(19) United States
(12) Patent Application Publication
(10) Pub. No.: US 2004/0175744 A1
(43) Pub. Date: Sep. 9, 2004

(54) Polynucleotide sequences and corresponding encoded polypeptides of particular secreted and membrane-bound proteins overexpressed in certain cancers

(76) Inventors: Qianjin Hu, Castro Valley, CA (US); Alan Peng, Palo Alto, CA (US); Bin Liu, Castro Valley, CA (US); James Robert Love, Millbrae, CA (US); Xiaofeng Hao, Chengdu (CN); Min Ren, Chengdu (CN); Zhumei Sheng, Chengdu (CN)

Correspondence Address: Dr Jamie Love, Vice President of Business Development, 14826 Wicks Blvd, San Leandro, CA, 94577, US

(21) Appl. No.: 10/775,920

(22) Filed: Feb. 10, 2004

Related U.S. Application Data
(60) Provisional application No. 60/447,900, filed on Feb. 13, 2003.

(51) Int. Cl. C12Q 1/68; G01N 33/53; G01N 33/574

(52) U.S. Cl. 435/6; 435/7.23

(57) ABSTRACT

The present invention relates to the identification of the over expression of certain genes encoding certain secreted and membrane-bound proteins in breast, lung, colon and kidney cancers. Knowledge that these genes are over expressed in the cancers is useful for the detection, diagnosis, prevention and treatment of the specific cancers.

### CROSS-REFERENCE TO RELEATED APPLICATION

[0001] This application claims priority benefit to U.S. provisional application Ser. No. 60/447,900, filed Feb. 13, 2003, for “POLYNUCLEOTIDE SEQUENCES AND CORRESPONDING ENCODED POLYPEPTIDES OF PARTICULAR SECRETED AND MEMBRANE-BOUND PROTEINS OVEREXPRESSED IN CERTAIN CANCERS”, which is incorporated herein in its entirety. The corresponding PCT application, for which an application number is not yet granted, has been filed and is also incorporated herein by reference.

### FEDERALLY SPONSORED RESEARCH

[0002] Not Applicable.

### SEQUENCE LISTING/FILE

[0003] All sequences referenced in this patent are on CD with file “14dec03.ST25.txt” (generated by PatentIn3.2) attached to this application and incorporated by reference.

### TECHNICAL FIELD OF THE INVENTION

[0004] This invention relates to certain polynucleotides encoding certain secreted and membrane-bound proteins (and the polypeptides they encode) which have been newly identified in connection with particular cancers; and uses of such polynucleotides and polypeptides in the detection, diagnosis, prevention and/or treatment of cancer.

### BACKGROUND OF THE INVENTION

[0005] Proteins targeted to the ER by a signal sequence can be released into the extracellular space as a secreted protein. For example, vesicles containing secreted proteins can fuse with the cell membrane and release their contents into the extracellular space—a process called exocytosis. Exocytosis can occur constitutively or after receipt of a triggering signal. In the latter case, the proteins are stored in secretory vesicles (or secretory granules) until exocytosis is triggered. Similarly, proteins residing on the cell membrane can also be secreted into the extracellular space by proteolytic cleavage of a “linker” holding the protein to the membrane.

[0006] Proteins lodged in the membrane of a cell (membrane-bound proteins) can facilitate signaling in the cell by being bound by a ligand and signaling through the interior portion of the protein activity to occur in the cell, for example via signal transduction mechanisms. Examples of such proteins are member for the tumor necrosis factor receptor family and the G-protein receptor family.

[0007] Both secreted and membrane-bound proteins are active in cell function and cell-cell communications and ultimately facilitate the well-being of a cell or its disorder. Recent progress in gene discovery has furthered interest in gene function, and two important functional groups are secreted proteins and membrane-bound proteins.

[0008] Thus, in light of the pervasive role of secreted and membrane-bound proteins in human physiology, a need exists for identifying and characterizing these proteins in the context of disorders such as cancer so that knowledge of the aberrant expression of such a protein in a particular cancer can be used to both diagnose and treat the cancer. The described invention identifies genes whose differential-regulation (increase in transcription and translation) is identified in tumors versus healthy tissue. This information (invention) can be used to arrive at a better diagnosis, prognosis or treatment regime. In addition, this information (invention) can be used to develop treatments or prevention such as (but not limited to) antisense technology, interfering RNA (iRNA) methods, antibodies or other ligands (with or without added effector functions), or as a foundation upon which to develop other therapeutic methods such as gene therapy methods.

### SUMMARY OF THE INVENTION

[0009] The present invention relates to diagnostic, prevention and therapeutic methods for detecting and treating certain cancers.

[0010] The present invention provides a method of breast cancer diagnosis comprising detecting over expression of a gene of a protein found in breast tissue selected from the group consisting of ATP transporter protein, GPCR (G-protein coupled receptor), GPCR (G-protein coupled receptor) 14, hypothetical protein (breast), unc-93, bone marrow stromal cell antigen 2, cadherin EGF LAG seven-pass G-type receptor 1 flamingo (Drosophila) homolog, carcinoembryonic antigen-related cell adhesion molecule 3, carcinoembryonic antigen-related cell adhesion molecule 6, carcinoembryonic antigen-related cell adhesion molecule 8, claudin 7, cleft lip and palate associated membrane transmembrane protein 1, fibroblast growth factor receptor 3, heme oxygenase (decycling) 1, immediate early response 3, mucin 1 transmembrane, NG22, phosphatidylinositol glycan (class Q), similar to CGI-78 protein, clone MGC:4880 IMAGE:3457593, solute carrier family 1 (member 4), solute carrier family 6 (member 8), tetraspan 1, transporter 1 ATP-binding cassette sub-family B (MDR/TAP) and Type I transmembrane receptor (seizure-related protein).

[0011] The gene can comprise a sequence selected from the group consisting of SEQ ID Nos 1-154.

[0012] In the method, detecting over expression can comprise a method selected from the group consisting of detecting a level of mRNA expression, detecting a level of protein expression, and probing for a polypeptide encoded by the gene.

[0013] The over expressed protein can comprise an amino acid sequence encoded by a gene selected from the group of genes having nucleic acid sequences of SEQ ID Nos 1-154.

[0014] The invention further provides a method of breast cancer treatment comprising blocking over expression of a gene encoding a secreted or membrane-bound protein found in breast tissue selected from the group consisting of SEQ ID Nos 1-154.

[0015] The gene can comprise a sequence selected from the group consisting of SEQ ID Nos 1-154.

[0016] The method of treatment can comprise a method selected from the group consisting of blocking expression of an mRNA encoded by the gene, blocking translation of the mRNA encoded by the gene, blocking expression of a protein encoded by the gene, blocking the function of the expressed protein, promoting the degradation of the expressed protein and using the protein as a tag to deliver treatment.

[0017] The method of treatment can comprise blocking an mRNA, polypeptide or protein comprising a nucleotide or amino acid sequence encoded by a gene selected from the group of genes having nucleic acid sequences of SEQ ID Nos 1-154.

[0018] The over expressed protein can be secreted.

[0019] The over expressed protein can be membrane-bound.

[0020] The invention further provides a method of lung cancer diagnosis comprising detecting over expression of a gene of a protein found in lung tissue selected from the group consisting of hypothetical protein, amino acid transporter 2, carboxypeptidase M, and putative G-protein coupled receptor.

[0021] The gene can comprise a sequence selected from the group consisting of SEQ ID Nos 155-184.

[0022] Detecting over expression of the gene comprises a method selected from the group consisting of detecting a level of mRNA expression, detecting a level of protein expression, and probing for a polypeptide encoded by the gene.

[0023] The over expressed protein can comprise an amino acid sequence encoded by a gene selected from the group of genes having nucleic acid sequences of SEQ ID Nos 155-184.

[0024] The invention also provides a method of lung cancer treatment comprising blocking over expression of a gene encoding a secreted or membrane-bound protein found in lung tissue selected from the group consisting of SEQ ID Nos 155-184.

[0025] The gene can comprise a sequence selected from the group consisting of SEQ ID Nos 155-184.

[0026] The method of treatment can comprise a method selected from the group consisting of blocking expression of an mRNA encoded by the gene, blocking translation of the mRNA encoded by the gene, and blocking expression of a protein encoded by the gene, blocking the function of the expressed protein, promoting the degradation of the expressed protein and using the protein as a tag to deliver treatment.

[0027] The method of treatment can comprise blocking an mRNA, polypeptide or protein comprising a nucleotide or amino acid sequence encoded by a gene selected from the group of genes having nucleic acid sequences of SEQ ID Nos 155-184.

[0028] The over expressed protein can be secreted.

[0029] The over expressed protein can be membrane-bound.

[0030] The invention further provides a method of colon cancer diagnosis comprising detecting over expression of a gene of a protein found in colon tissue selected from the group consisting of hypothetical protein (colon), cadherin, formyl peptide receptor 1, AE-binding protein 1, solute carrier family 21 (organic anion transporter) member 12, secreted phosphoprotein 1 (osteopontin, bone sialoprotein I), Type I transmembrane protein Fn14, hypoxia-inducible protein 2, alpha-2-glycoprotein 1 zinc, chitinase 3-like1 (cartilage glycoprotein-39) and triggering receptor expressed on myeloid cells 2.

[0031] The gene can comprise a sequence selected from the group consisting of SEQ ID Nos 185-246.

[0032] Detecting over expression can comprise a method selected from the group consisting of detecting a level of mRNA expression, detecting a level of protein expression, and probing for a polypeptide encoded by the gene.

[0033] The over expressed protein can comprise an amino acid sequence encoded by a gene selected from the group of genes having nucleic acid sequences of SEQ ID Nos 185-246.

[0034] The invention also provides a method of colon cancer treatment comprising blocking over expression of a gene encoding a secreted or membrane-bound protein found in colon tissue selected from the group consisting of SEQ ID Nos 185-246.

[0035] The gene can comprise a sequence selected from the group consisting of SEQ ID Nos 185-246.

[0036] The method of treatment can comprise a method selected from the group consisting of blocking expression of an mRNA encoded by the gene, blocking translation of the mRNA encoded by the gene, and blocking expression of a protein encoded by the gene, blocking the function of the expressed protein, promoting the degradation of the expressed protein and using the protein as a tag to deliver treatment.

[0037] The method of treatment can comprise blocking an mRNA, polypeptide or protein comprising a nucleotide or amino acid sequence encoded by a gene selected from the group of genes having nucleic acid sequences of SEQ ID Nos 185-246.

[0038] The over expressed protein can be secreted.

[0039] The over expressed protein can be membrane-bound.

[0040] The invention further provides a method of kidney cancer diagnosis comprising detecting over expression of a gene of a protein found in kidney tissue selected from the group consisting of scavenger receptor class B, adenosine receptor A3, CD97 antigen, APO E-C2 gene, basement membrane-induced gene, integrin alpha 5 (fibronectin receptor, alpha polypeptide), peptide transporter 3, hypothetical protein FLJ22341, solute carrier family 16 (monocarboxylic acid transporters), interleukin 10 receptor alpha, FXYD domain-containing ion transport regulator 5, retinoic acid receptor responder (tazarotene induced) 2, integrin alpha X (antigen CD11C (p150) alpha polypeptide), sema domain seven thrombospondin repeats (type 1 and type 1-like) transmembrane domain (TM) I and short cytoplasmic domain (semaphoring) 5B, Guanylate binding protein 1 interferon-inducible 67 kD, leukocyte immunoglobulin-like receptor subfamily B, discoidin domain receptor family member 2, caveolin 1 caveolae protein 22 kD, chloride intracellular channel 1, CD36 antigen (collagen type I receptor, thrombospondin recep), small inducible cytokine A4 (homologous to mouse Mip-1b), lysosomal-associated multispanning membrane protein-5, integrin beta 2 antigen CD18 (p95) lymphocyte funtion-assoc, chemokine (C-X-C motif) receptor 4 (fusin), CD2 antigen (p50) sheep red blood cell receptor and epithelial membrane protein 3.

[0041] The gene can comprise a sequence selected from the group consisting of SEQ ID Nos 247-385.

[0042] Detecting over expression can comprise a method selected from the group consisting of detecting a level OF mRNA expression, detecting a level of protein expression, and probing for a polypeptide encoded by the gene.

[0043] The over expressed protein can comprise an amino acid sequence encoded by a gene selected from the group of genes having nucleic acid sequences of SEQ ID Nos 247-385.

[0044] The invention also provides a method of colon cancer treatment comprising blocking over expression of a gene encoding a secreted or membrane-bound protein found in colon tissue selected from the group consisting of SEQ ID Nos 247-385.

[0045] The gene can comprise a sequence selected from the group consisting of SEQ ID Nos 247-385.

[0046] The method of treatment can comprise a method selected from the group consisting of blocking expression of AN mRNA encoded by the gene, blocking translation of THE mRNA encoded by the gene, and blocking expression of a protein encoded by the gene, blocking the function of the expressed protein, promoting the degradation of the expressed protein and using the protein as a tag to deliver treatment.

[0047] The method of treatment can comprise blocking AN mRNA, polypeptide or protein comprising a nucleotide or amino acid sequence encoded by a gene selected from the group of genes having nucleic acid sequences of SEQ ID Nos 247-385.

[0048] The over expressed protein can be secreted.

[0049] The over expressed protein can be membrane-bound.

[0050] The invention provides an antibody or binding portion of an antibody that specifically binds a protein found in breast tissue, wherein the protein is selected from the group consisting of ATP transporter protein, GPCR (G-protein coupled receptor), GPCR (G-protein coupled receptor) 14, hypothetical protein (breast), unc-93, bone marrow stromal cell antigen 2, cadherin EGF LAG seven-pass G-type receptor 1 flamingo (Drosophila) homolog, carcinoembryonic antigen-related cell adhesion molecule 3, carcinoembryonic antigen-related cell adhesion molecule 6, carcinoembryonic antigen-related cell adhesion molecule 8, claudin 7, cleft lip and palate associated membrane transmembrane protein 1, fibroblast growth factor receptor 3, heme oxygenase (decycling) 1, immediate early response 3, mucin 1 transmembrane, NG22, phosphatidylinositol glycan (class Q), similar to CGI-78 protein, clone MGC:4880 IMAGE:3457593, solute carrier family 1 (member 4), solute carrier family 6 (member 8), tetraspan 1, transporter 1 ATP-binding cassette sub-family B (MDRITAP) and Type I transmembrane receptor (seizure-related protein).

[0051] The invention further provides a method of breast cancer diagnosis or prognosis comprising contacting an antibody or binding portion of an antibody specific to an over expressed protein in breast cancer cells, with the over expressed protein for which the antibody or binding portion thereof is specific.

[0052] The invention also provides a method of breast cancer treatment comprising blocking an over expressed protein selected from the group consisting of ATP transporter protein, GPCR (G-protein coupled receptor), GPCR (G-protein coupled receptor) 14, hypothetical protein (breast), unc-93, bone marrow stromal cell antigen 2, cadherin EGF LAG seven-pass G-type receptor 1 flamingo (Drosophila) homolog, carcinoembryonic antigen-related cell adhesion molecule 3, carcinoembryonic antigen-related cell adhesion molecule 6, carcinoembryonic antigen-related cell adhesion molecule 8, claudin 7, cleft lip and palate associated membrane transmembrane protein 1, fibroblast growth factor receptor 3, heme oxygenase (decycling) 1, immediate early response 3, mucin 1 transmembrane, NG22, phosphatidylinositol glycan (class Q), similar to CGI-78 protein, clone MGC:4880 IMAGE:3457593, solute carrier family 1 (member 4), solute carrier family 6 (member 8), tetraspan 1, transporter 1 ATP-binding cassette sub-family B (MDRITAP) and Type I transmembrane receptor (seizure-related protein), with an antibody or binding portion thereof specific for said protein.

[0053] The invention likewise provides an antibody or binding portion of an antibody that specifically binds a protein found in lung tissue, wherein the protein is selected from the group consisting of over expressed in lung of hypothetical protein, amino acid transporter 2, carboxypeptidase M, and putative G-protein coupled receptor.

[0054] The invention also provides a method of lung cancer diagnosis or prognosis comprising contacting an antibody or binding portion of an antibody specific to an over expressed protein in lung cancer cells, with the over expressed protein for which the antibody or binding portion thereof is specific.

[0055] The invention provides a method of lung cancer treatment comprising blocking an over expressed protein selected from the group consisting of over expressed in lung of hypothetical protein, amino acid transporter 2, carboxypeptidase M, and putative G-protein coupled receptor, with an antibody or binding portion thereof specific for said protein.

[0056] The invention provides an antibody or binding portion of an antibody that specifically binds to a protein found in colon tissue, wherein the protein is selected from the group consisting of hypothetical protein (colon), cadherin, formyl peptide receptor 1, AE-binding protein 1, solute carrier family 21 (organic anion transporter) member 12, cadherin 3 type 1 P-cadherin (placental), secreted phosphoprotein 1 (osteopontin, bone sialoprotein I), Type I transmembrane protein Fn14, hypoxia-inducible protein 2, alpha-2-glycoprotein 1 zinc, chitinase 3-like1 (cartilage glycoprotein-39) and triggering receptor expressed on myeloid cells 2.

[0057] The invention further provides a method of colon cancer diagnosis or prognosis comprising contacting an antibody or binding portion of an antibody specific to an over expressed protein in colon cancer cells, with the over expressed protein for which the antibody or binding portion thereof is specific

[0058] The invention also provides a method of colon cancer treatment comprising blocking an overexpressed protein selected from the group consisting of hypothetical protein (colon), cadherin, formyl peptide receptor 1, AE-binding protein 1, solute carrier family 21 (organic anion transporter) member 12, secreted phosphoprotein 1 (osteopontin, bone sialoprotein I), Type I transmembrane protein Fn14, hypoxia-inducible protein 2, alpha-2-glycoprotein 1 zinc, chitinase 3-like 1 (cartilage glycoprotein-39) and triggering receptor expressed on myeloid cells 2.

[0059] The invention provides an antibody or binding portion. of an antibody that specifically binds to a protein found in kidney tissue, wherein the protein is selected from the group consisting of scavenger receptor class B, adenosine receptor A3, CD97 antigen, APO E-C2 gene, basement membrane-induced gene, integrin alpha 5 (fibronectin receptor, alpha polypeptide), peptide transporter 3, hypothetical protein FLJ22341, solute carrier family 16 (monocarboxylic acid transporters), interleukin 10 receptor alpha, FXYD domain-containing ion transport regulator 5, retinoic acid receptor responder (tazarotene induced) 2, integrin alpha X (antigen CD11C (p150), alpha polypeptide), sema domain seven thrombospondin repeats (type 1 and type 1-like) transmembrane domain (TM) and short cytoplasmic domain (semaphoring) 5B, Guanylate binding protein 1 interferon-inducible 67 kD, leukocyte immunoglobulin-like receptor subfamily B, discoidin domain receptor family member 2, caveolin 1 caveolae protein 22 kD, chloride intracellular channel 1, CD36 antigen (collagen type I receptor, thrombospondin recep), small inducible cytokine A4 (homologous to mouse Mip-1b), lysosomal-associated multispanning membrane protein-5, integrin beta 2 antigen CD18 (p95) lymphocyte funtion-assoc, chemokine (C-X-C motif) receptor 4 (fusin), CD2 antigen (p50) sheep red blood cell receptor and epithelial membrane protein 3.

[0060] The invention provides a method of kidney cancer diagnosis or prognosis comprising contacting an antibody or binding portion of an antibody specific to an over expressed protein in kidney cancer cells, with the over expressed protein for which the antibody or binding portion thereof is specific.

[0061] The invention provides a method of kidney cancer treatment comprising blocking an over expressed protein selected from the group consisting of scavenger receptor class B, adenosine receptor A3, CD97 antigen, APO E-C2 gene, basement membrane-induced gene, integrin alpha 5 (fibronectin receptor, alpha polypeptide), peptide transporter 3, hypothetical protein FLJ22341, solute carrier family 16 (monocarboxylic acid transporters), interleukin 10 receptor alpha, FXYD domain-containing ion transport regulator 5, retinoic acid receptor responder (tazarotene induced) 2, integrin alpha X (antigen CD11C (p150), alpha polypeptide), sema domain seven thrombospondin repeats (type 1 and type 1-like) transmembranelain (TM) and and short cytoplasmic domain (semaphoring) 5B, Guanylate binding protein 1 interferon-inducible 67 kD, leukocyte immunoglobulin-like receptor subfamily B, discoidin domain receptor family member 2, caveolin 1 caveolaE protein 22 kD, chloride intracellular channel 1, CD36 antigen (collagen type I receptor, thrombospondin recep), small inducible cytokine A4 (homologous to mouse Mip-1b), lysosomal-associated multispanning membrane protein-5, integrin beta 2 antigen CD18 (p95) lymphocyte funtion-assoc, chemokine (C-X-C motif) receptor 4 (fusin), CD2 antigen (p50) sheep red blood cell receptor and epithelial membrane protein 3.

[0062] These and other objects and features of the invention will become more fully apparent when the following detailed description of the invention is read in conjunction with the accompanying drawings.

### BRIEF DESCRIPTION OF THE FIGS.

[0063] FIG. 1: Immunohistochemical data, produced using antibodies to Clone-49 (coding for Unigene#Hs.323477 and described as “solute carrier family 16 (monocarboxylic acid transporters), member 3; monocarboxylate transporter 3 [Homo sapiens]”), indicating evidence that the protein (“solute carrier family 16 (monocarboxylic acid transporters), member 3; monocarboxylate transporter 3 [Homo sapiens]”) is highly expressed on the membrane of the tumor (best seen at higher magnification in lower right image) but not normal tissues (best seen at higher magnification in lower left image).

### DETAILED DESCRIPTION OF PREFERRED EMBODIMENT

[0064] The present invention provides novel methods and compositions involving polypeptides and polynucleotides specifically differentially expressed in tissues of cancer patients as summarized in Table 1. The invention can be used in various aspects of genome analysis that finds utility in both basic biological research and medical diagnosis and therapeutics.

TABLE 1
Polynucleotides and Polypeptides of Secreted and Membrane-Bound Proteins
Previously Unidentified as Over Expressed in Breast, Lung, Colon and Kidney Cancers

| Mergen | Over expressed | | | |
|---|---|---|---|---|
| Clone | in Tumor | Sequence | UniGene ID# (or | |
| Identifier¹ | tissues | ID# | GeneBank#) | Description of gene |
| Clone-01 | breast | #1-8 | Hs.134514 | ATP-binding, transporter |
| Clone-02 | breast | #9-13 | Hs.194691 | GPCR (G-protein coupled receptor) |
| Clone-03 | breast | #14 | Hs.192720 | GPCR (G-protein coupled receptor) 14 |
| Clone-04 | breast | #15-16 | Hs.348504 | hypothetical protein (breast) |
| Clone-06 | breast | #17-20 | Hs.135187 | unc-93 |
| Clone-07 | breast | #21-23 | Hs.118110 | Bone marrow stromal cell antigen 2 |
| Clone-08 | breast | #24-27 | Hs.252387 | Cadherin, EGF LAG seven-pass G-type receptor 1, |
| | | | | flamingo (Drosophila) homolog (LAG = lymphocyte |
| | | | | activation protein) |
| Clone-09 | breast | #28-32 | Hs.11 | Carcinoembryonic antigen-related cell adhesion |
| | | | | molecule 3 |
| Clone-10 | breast | #33-37 | Hs.73848 | Carcinoembryonic antigen-related cell adhesion |
| | | | | molecule 6 (non-specific cross reacting antigen) |
| Clone-11 | breast | #38-42 | Hs.41 | Carcinoembryonic antigen-related cell adhesion |
| | | | | molecule 8 |
| Clone-12 | breast | #43-45 | Hs.278562 | Claudin 7 |
| Clone-15 | breast | #46-52 | Hs.106671 | Cleft lip and palate associated transmembrane protein 1 |
| Clone-16 | breast | #53-62 | Hs.1420 | Fibroblast growth factor receptor 3 (achondroplasia, |
| | | | | thanatophoric dwarfism) |
| Clone-17 | breast | #63-67 | Hs.202833 | Heme oxygenase (decycling) 1 |
| Clone-18 | breast | #68-76 | Hs.76095 | Immediate early response 3 |
| Clone-19 | breast | #77-94 | Hs.89603 | Mucin 1, transmembrane |
| Clone-20 | breast | #95-100 | Hs.334514 | NG22 protein |
| Clone-21 | breast | #101-108 | Hs.18079 | Phosphatidylinositol glycan, class Q |
| Clone-22 | breast | #109-119 | Hs.108408 | Similar to CGI-78 protein, clone MGC: 4880 |
| | | | | IMAGE:3457593, mRNA, complete cds |
| Clone-23 | breast | #120-125 | Hs.323878 | Solute carrier family 1 (glutamate/neutral amino acid |
| | | | | transporter), member 4 |
| Clone-24 | breast | #126-129 | Hs.187958 | Solute carrier family 6 (neurotransmitter transporter, |
| | | | | creatine), member 8 |
| Clone-25 | breast | #130-136 | Hs.38972 | Tetraspan 1 |
| Clone-26 | breast | #137-146 | Hs.352018 | Transporter 1, ATP-binding cassette, sub-family B |
| | | | | (MDR/TAP) |
| Clone-27 | breast | #147-154 | Hs.6314 | Type I transmembrane receptor (seizure-related protein) |
| Clone-28 | lung | #155-159 | Hs.283558 | Hypothetical protein |
| Clone-29 | lung | #160-170 | Hs.298275 | Amino acid transporter 2 |
| Clone-30 | lung | #171-175 | Hs.334873 | Carboxypeptidase M |
| Clone-31 | lung | #176-184 | Hs.16085 | Putative G-protein coupled receptor |
| Clone-13 | colon | #185 | (XM_085932) | NEW GENE |
| Clone-14 | colon | #186-188 | Hs.2877 | Cadherin |
| Clone-32 | colon | #189-193 | Hs.753 | Formyl peptide receptor 1 |
| Clone-33 | colon | #194-198 | Hs.118397 | AE-binding protein 1 |
| Clone-34 | colon | #199-206 | Hs.235782 | Solute carrier family 21 (organic anion transporter), |
| | | | | member 12 |
| Clone-35 | colon | #207-219 | Hs.313 | Secreted phosphoprotein 1 (osteopontin, bone |
| | | | | sialoprotein I, |
| Clone-36 | colon | #220-225 | Hs.355899 | Type I transmembrane protein Fn14 |
| Clone-37 | colon | #226-229 | Hs.61762 | Hypoxia-inducible protein 2 |
| Clone-38 | colon | #230-236 | Hs.71 | Alpha-2-glycoprotein 1, zinc |
| Clone-39 | colon | #237-241 | Hs.75184 | Chitinase 3-like 1 (cartilage glycoprotein-39) |
| Clone-40 | colon | #242-246 | Hs.44234 | Triggering receptor expressed on myeloid cells 2 |
| Clone-41 | kidney | #247-249 | Hs.180616 | Scavenger receptor class B |
| Clone-42 | kidney | #250-255 | Hs.258 | Adenosine receptor A3 |
| Clone-43 | kidney | #256-261 | Hs.3107 | CD97 antigen |
| Clone-44 | kidney | #262 | (M20903) | APO E-C2 gene |
| Clone-45 | kidney | #263-269 | Hs.10649 | Basement membrane-induced gene |
| Clone-46 | kidney | #270-273 | Hs.149609 | Integrin, alpha 5 (fibronectin receptor, alpha |
| | | | | polypeptide) |
| Clone-47 | kidney | #274-277 | Hs.237856 | Peptide transporter 3 |
| Clone-48 | kidney | #278-284 | Hs.25485 | Hypothetical protein FLJ22341 |
| Clone-49 | kidney | #285-286 | Hs.323477 | Solute carrier family 16 (monocarboxylic acid |
| | | | | transporters) |
| Clone-50 | kidney | #287-289 | Hs.327 | Interleukin 10 receptor, alpha |
| Clone-51 | kidney | #290-296 | Hs.333418 | FXYD domain-containing ion transport regulator 5 |
| Clone-52 | kidney | #297-301 | Hs.37682 | Retinoic acid receptor responder (tazarotene induced) 2 |
| Clone-53 | kidney | #302-306 | Hs.51077 | Integrin, alpha X (antigen CD11C (p150), alpha |
| | | | | polypeptide) |
| Clone-54 | kidney | #307-310 | Hs.61384 | Sema domain, seven thrombospondin repeats (type 1 |
| | | | | and type 1-like), transmembrane domain (TM) and short |
| | | | | cytoplasmic domain, (semaphorin) 5B |
| Clone-55 | kidney | #311-313 | Hs.62661 | Guanylate binding protein 1, interferon-inducible, 67 kD |
| Clone-56 | kidney | #314-319 | Hs.67846 | Leukocyte immunoglobulin-like receptor, subfamily B |
| Clone-57 | kidney | #320-322 | Hs.71891 | Discoidin domain receptor family, member 2 |
| Clone-58 | kidney | #323-330 | Hs.74034 | Caveolin 1, caveolae protein, 22 kD |
| Clone-59 | kidney | #331-335 | Hs.74276 | Chloride intracellular channel 1 |
| Clone-60 | kidney | #336-346 | Hs.75613 | CD36 antigen (collagen type I receptor, thrombospondin |
| | | | | recep) |
| Clone-61 | kidney | #347-354 | Hs.75703 | Small inducible cytokine A4 (homologous to mous Mip- |
| | | | | 1b) |
| Clone-62 | kidney | #355-358 | Hs.79356 | Lysosomal-associated multispanning membrane |
| | | | | protein-5 |
| Clone-63 | kidney | #359-365 | Hs.83968 | Integrin, beta 2 (antigen CD18 (p95), lymphocyte |
| | | | | funtion-assoc |
| Clone-64 | kidney | #366-375 | Hs.89414 | Chemokine (C-X-C motif), receptor 4 (fusin) |
| Clone-65 | kidney | #376-380 | Hs.89476 | CD2 antigen (p50), sheep red blood cell receptor |
| Clone-66 | kidney | #381-385 | Hs.9999 | Epithelial membrane protein 3 |

¹The 65 “clones” are numbered “Clone-01” to “Clone-66” but there is no clone “Clone-05“. Clone-13 and Clone-14 are repositioned in the table to better illustrate their tissue (tumor) association.

[0065] The present invention is based, in part, on the discovery of differential levels of expression of these listed polynucleotides in tissue samples of cancerous tissue, as compared to normal tissue samples. The present invention provides polynucleotides, as well as their corresponding gene products, that are present at elevated levels in a variety of tumors. These polynucleotides (or fragments thereof) and polypeptides (or antigenic fragments thereof), and antibodies that bind such polypeptides, are useful in a variety of diagnostic, prophylactic and therapeutic methods.

[0066] In other embodiments, a polynucleotide of the present invention comprises a detectable label, and/or is attached to a solid support. In other embodiments, a polynucleotide of the present invention is single stranded and in yet other embodiments, is double stranded. The present invention also encompasses host cells comprising an isolated polynucleotide of the present invention.

[0067] The present invention also provides kits, electronic libraries and arrays comprising polynucleotides of the present invention for use in diagnosing the presence of disease tissue in a test sample.

[0068] The present invention also provides methods of screening for disease activity, comprising: contacting a tissue sample derived from a cancer-associated cell with a drug candidate; monitoring the expression of a polynucleotide having the sequence shown in the file “14dec03.ST25.txt” (generated by PatentIn3.2) attached to this application and incorporated by reference or a fragment thereof, in the tissue sample; and determining the efficacy of the drug candidate.

[0069] Unless otherwise indicated, all terms used herein have the meanings given below, and are generally consistent with same meaning that the terms have to those skilled in the art of the present invention. Practitioners are particularly directed to Sambrook et al. (1989) Molecular Cloning: A Laboratory Manual (Second Edition), Cold Spring Harbor Press, Plainview, N.Y. and Ausubel F M et al. (1993) Current Protocols in Molecular Biology, John Wiley & Sons, New York, N.Y., for definitions and terms of the art. It is to be understood that this invention is not limited to the particular methodology, protocols, and reagents described, as these may vary.

[0070] All publications cited herein are expressly incorporated herein by reference for the purpose of describing and disclosing compositions and methodologies that might be used in connection with the invention.

[0071] 1. Definitions, Methods and Materials

[0072] The following definitions are provided to facilitate understanding of certain terms used throughout this specification.

[0073] In the present invention, “isolated” refers to material removed from its original environment (e.g. the natural environment if it is naturally occurring), and thus is altered “by the hand of man” from its natural state. For example, an isolated polynucleotide could be part of a vector or a composition of matter, or could be contained within a cell, and still be “isolated” because that vector, composition of matter, or particular cell is not the original environment of the polynucleotide.

[0074] In the present invention, a “secreted” protein refers to those proteins capable of being directed to the ER, secretory vesicles, or the extracellular space as a result of a signal sequence, as well as those proteins released into the extracellular space without necessarily containing a signal sequence. If the secreted protein is released into the extracellular space, the secreted protein can undergo extracellular processing to produce a “mature” protein. Release into the extracellular space can occur by many mechanisms, including exocytosis and proteolytic cleavage.

[0075] A “membrane-bound protein” refers to proteins such as described in U.S. Pat. Nos. 6,043,052 and 6,013,476, both of which describe exemplary membrane-bound proteins of two different families.

[0076] As used herein, a “polynucleotide” refers to a molecule having a nucleic acid sequence contained in the file “14dec03.ST25.txt” (generated by PatentIn3.2) attached to this application and incorporated by reference. For example, the polynucleotide can contain the nucleotide sequence of the full length cDNA sequence, including the 5′ and 3′ untranslated sequences, the coding region, with or without the signal sequence, the secreted protein coding region, as well as fragments, epitopes, domains, and variants of the nucleic acid sequence. Moreover, as used herein, a “polypeptide” refers to a molecule having the translated amino acid sequence generated from the polynucleotide as broadly defined.

[0077] In the present invention, the full-length sequence identified in the file “14dec03.ST25.txt” (generated by PatentIn3.2) attached to this application and incorporated by reference, was often generated by overlapping sequences contained in multiple clones (contig analysis).

[0078] A “polynucleotide” of the present invention also includes those polynucleotides capable of hybridizing, under stringent hybridization conditions, to sequences contained in the file “14dec03.ST25.txt” (generated by PatentIn3.2) attached to this application and incorporated by reference, the complement thereof. “Stringent hybridization conditions” refers to an overnight incubation at 42° C. in a solution comprising 50% formamide, 5×SSC (750 mM NaCl, 75 mM sodium citrate), 50 mM sodium phosphate (pH 7.6), 5×Denhardt's solution, 10% dextran sulfate, and 20 μg/ml denatured, sheared salmon sperm DNA, followed by washing the filters in 0.1×SSC at about 65° C.

[0079] Also contemplated are nucleic acid molecules that hybridize to the polynucleotides of the present invention at lower stringency hybridization conditions. Changes in the stringency of hybridization and signal detection are primarily accomplished through the manipulation of formamide concentration (lower percentages of formamide result in lowered stringency), salt conditions, or temperature. For example, lower stringency conditions include an overnight incubation at 37° C. in a solution comprising 6×SSPE (20×SSPE=3M NaCl; 0.2M NaH₂ PO₄; 0.02M EDTA, pH 7.4), 0.5% SDS, 30% formamide, 100 μg/ml salmon sperm blocking DNA; followed by washes at 50° C. with I×SSPE, 0.1% SDS. In addition, to achieve even lower stringency, washes performed following stringent hybridization can be done at higher salt concentrations (e.g. 5×SSC).

[0080] Note that variations in the above conditions may be accomplished through the inclusion and/or substitution of alternate blocking reagents used to suppress background in hybridization experiments. Typical blocking reagents include Denhardt's reagent, BLOTTO, heparin, denatured salmon sperm DNA, and commercially available proprietary formulations. The inclusion of specific blocking reagents may require modification of the hybridization conditions described above, due to problems with compatibility.

[0081] Of course, a polynucleotide which hybridizes only to polyA+sequences (such as any 3′ terminal polyA+tract of a cDNA shown in the sequence listing), or to a complementary stretch of T (or U) residues, would not be included in the definition of “polynucleotide,” since such a polynucleotide would hybridize to any nucleic acid molecule containing a poly (A) stretch or the complement thereof (e.g. practically any double-stranded cDNA clone).

[0082] The polynucleotides of the present invention can be composed of any polyribonucleotide or polydeoxribonucleotide, which may be unmodified RNA or DNA or modified RNA or DNA. For example, polynucleotides can be composed of single- and double-stranded DNA, DNA that is a mixture of single- and double-stranded regions, single- and double-stranded RNA, and RNA that is mixture of single- and double-stranded regions, hybrid molecules comprising DNA and RNA that may be single-stranded or, more typically, double-stranded or a mixture of single- and double-stranded regions. In addition, the polynucleotides can be composed of triple-stranded regions comprising RNA or DNA or both RNA and DNA. A polynucleotide may also contain one or more modified bases or DNA or RNA backbones modified for stability or for other reasons. “Modified” bases include, for example, tritylated bases and unusual bases such as inosine. A variety of modifications can be made to DNA and RNA; thus, “polynucleotide” embraces chemically, enzymatically, or metabolically modified forms.

[0083] A “microarray” is a linear or two-dimensional array of preferably discrete regions, each having a defined area, formed on the surface of a solid support. The density of the discrete regions on a microarray is determined by the total numbers of target polynucleotides to be detected on the surface of a single solid phase support, preferably at least about 50/cm², more preferably at least about 100/cm², even more preferably at least about 500/cm², and still more preferably at least about 1,000/cm². As used herein, a DNA microarray is an array of oligonucleotides, oligonucleotides primers or cDNA placed on a chip or other surfaces used to amplify, clone or identify target polynucleotides. Since the position of each particular group of oligonucleotides in the array is known, the identities of the target polynucleotides can be determined based on their binding to a particular position in the microarray.

[0084] The term “label” refers to a composition capable of producing a detectable signal indicative of the presence of the target polynucleotide in an assay sample. Suitable labels include radioisotopes, nucleotide chromophores, enzymes, substrates, fluorescent molecules, chemiluminescent moieties, magnetic particles, bioluminescent moieties, and the like. As such, a label is any composition detectable by spectroscopic, photochemical, biochemical, immunochemical, electrical, optical or chemical means.

[0085] The term “support” refers to conventional supports such as beads, particles, dipsticks, fibers, filters, plastics, polymers, membranes and silane or silicate supports such as glass slides.

[0086] As used herein, a “biological sample” refers to a sample of tissue or fluid isolated from an individual, including but not limited to, for example, blood, plasma, serum, spinal fluid, lymph fluid, the external sections of the skin, respiratory, intestinal, and genitourinary tracts, tears, saliva, milk, cells (including but not limited to blood cells), tumors, organs, and also samples of in vitro cell culture constituents.

[0087] The term “biological sources” as used herein refers to the sources from which the target polynucleotides are derived from. The source can be of any form of “sample” as described above, including but not limited to, cell, tissue or fluid. “Different biological sources” can refer to different cells/tissues/organs of the same individual, or cells/tissues/organs from different individuals of the same species, or cells/tissues/organs from different species.

[0088] The polypeptides of the present invention can be composed of amino acids joined to each other by peptide bonds or modified peptide bonds, i.e., peptide isosteres, and may contain amino acids other than the 20 gene-encoded amino acids. The polypeptides may be modified by either natural processes, such as posttranslational processing, or by chemical modification techniques which are well known in the art. Such modifications are well described in basic texts and in more detailed monographs, as well as in a voluminous research literature. Modifications can occur anywhere in a polypeptide, including the peptide backbone, the amino acid side-chains and the amino or carboxyl termini. It will be appreciated that the same type of modification may be present in the same or varying degrees at several sites in a given polypeptide. Also, a given polypeptide may contain many types of modifications. Polypeptides may be branched, for example, as a result of ubiquitination, and they may be cyclic, with or without branching. Cyclic, branched, and branched cyclic polypeptides may result from posttranslation natural processes or may be made by synthetic methods. Modifications include acetylation, acylation, ADP-ribosylation, amidation, covalent attachment of flavin, covalent attachment of a heme moiety, covalent attachment of a nucleotide or nucleotide derivative, covalent attachment of a lipid or lipid derivative, covalent attachment of phosphotidylinositol, cross-linking, cyclization, disulfide bond formation, demethylation, formation of covalent cross-links, formation of cysteine, formation of pyroglutamate, formylation, gamma-carboxylation, glycosylation, GPl anchor formation, hydroxylation, iodination, methylation, myristoylation, oxidation, pegylation, proteolytic processing, phosphorylation, prenylation, racemization, selenoylation, sulfation, transfer-RNA mediated addition of amino acids to proteins such as arginylation, and ubiquitination. (See, for instance, PROTEINS—STRUCTURE AND MOLECULAR PROPERTIES, 2nd Ed., T. E. Creighton, W. H. Freeman and Company, New York (1993); POSTTRANSLATIONAL COVALENT MODIFICATION OF PROTEINS, B. C. Johnson, Ed., Academic Press, New York, pgs. 1-12 (1983); Seifter et al., Meth Enzymol 182:626-646 (1990); Rattan et al., Ann NY Acad Sci 663:48-62 (1992).)

[0089] “DNA sequences” refers to a polynucleotide sequence identified by an integer specified in the file “14dec03.ST25.txt” (generated by PatentIn3.2) attached to this application and incorporated by reference.

[0090] “A polypeptide having biological activity” refers to polypeptides exhibiting activity similar, but not necessarily identical to, an activity of a polypeptide of the present invention, including mature forms, as measured in a particular biological assay, with or without dose dependency. In the case where dose dependency does exist, it need not be identical to that of the polypeptide, but rather substantially similar to the dose-dependence in a given activity as compared to the polypeptide of the present invention (i.e., the candidate polypeptide will exhibit greater activity or not more than about 25-fold less and, preferably, not more than about tenfold less activity, and most preferably, not more than about three-fold less activity relative to the polypeptide of the present invention.)

[0091] The over expressed genes detected from breast tissue include ATP transporter protein, GPCR (G-protein coupled receptor), GPCR (G-protein coupled receptor) 14, hypothetical protein (breast), unc-93, bone marrow stromal cell antigen 2, cadherin EGF LAG seven-pass G-type receptor 1 flamingo (Drosophila) homolog, carcinoembryonic antigen-related cell adhesion molecule 3, carcinoembryonic antigen-related cell adhesion molecule 6, carcinoembryonic antigen-related cell adhesion molecule 8, claudin 7, cleft lip and palate associated membrane transmembrane protein 1, fibroblast growth factor receptor 3, heme oxygenase (decycling) 1, immediate early response 3, mucin 1 transmembrane, NG22, phosphatidylinositol glycan (class Q), similar to CGI-78 protein, clone MGC:4880 IMAGE:3457593, solute carrier family 1 (member 4), solute carrier family 6 (member 8), tetraspan 1, transporter 1 ATP-binding cassette sub-family B (MDR/TAP) and Type I transmembrane receptor (seizure-related protein).

[0092] The over expressed genes detected from lung tissue include hypothetical protein, amino acid transporter 2, carboxypeptidase M, and putative G-protein coupled receptor.

[0093] The over expressed genes detected from colon tissue include hypothetical protein (colon), cadherin, formyl peptide receptor 1, AE-binding protein 1, solute carrier family 21 (organic anion transporter) member 12, secreted phosphoprotein 1 (osteopontin, bone sialoprotein 1), Type I transmembrane protein Fn14, hypoxia-inducible protein 2, alpha-2-glycoprotein 1 zinc, chitinase 3-like1 (cartilage glycoprotein-39) and triggering receptor expressed on myeloid cells 2.

[0094] The over expressed genes detected from kidney tissue include scavenger receptor class B, adenosine receptor A3, CD97 antigen, APO E-C2 gene, basement membrane-induced gene, integrin alpha 5 (fibronectin receptor, alpha polypeptide), peptide transporter 3, hypothetical protein FLJ22341, solute carrier family 16 (monocarboxylic acid transporters), interleukin 10 receptor alpha, FXYD domain-containing ion transport regulator 5, retinoic acid receptor responder.(tazarotene induced.) 2, integrin alpha X (antigen CD11C (p150), alpha polypeptide), sema domain seven thrombospondin repeats (type 1 and type 1-like) transmembrane domain (TM) and short cytoplasmic domain (semaphorin) 5B, guanylate binding protein 1 interferon-inducible 67 kD, leukocyte immunoglobulin-like receptor subfamily B, discoidin domain receptor family member 2, caveolin 1 caveolae protein 22 kD, chloride intracellular channel 1, CD36 antigen (collagen type I receptor, thrombospondin recep), small inducible cytokine A4 (homologous to mouse Mip-1b), lysosomal-associated multispanning membrane protein-5, integrin beta 2 antigen CD18 (p95) lymphocyte funtion-assoc, chemokine (C-X-C motif) receptor 4 (fusin), CD2 antigen (p50) sheep red blood cell receptor and epithelial membrane protein 3.

[0095] Table 1 identifies these genes by Sequence ID number and accession numbers and can be used as a reference to the file “14dec03.ST25.txt” (generated by PatentIn3.2) attached to this application and incorporated by reference.

[0096] Supplemental data supplied in Example 6 show the results supporting this patent by identifying the differential expression associated with diseased versus cancerous tissue.

[0097] Therefore, polynucleotides and polypeptides of the invention are useful as reagents for differential identification of the tissue(s) or cell type(s) present in a biological sample and for diagnosis of diseases and conditions which include, but are not limited to, breast cancer for some proteins, lung cancer for other proteins, colon cancer for other proteins, and kidney cancer for still other proteins. Some of these proteins fall into the category of secreted proteins and others are membrane-bound proteins. The proteins are referenced by the UniGene ID# (or GeneBank# when a UniGene ID# is not available) of their genes and the descriptive names of the proteins expressed by these genes. The polynucleotides are displayed sequentially in the Sequence listing in the file “14dec03.ST25.txt” (generated by PatentIn3.2) attached to this application and incorporated by reference.

[0098] Similarly, polypeptides and antibodies directed to these polypeptides are useful in providing immunological probes for differential identification of the breast, lung, colon or kidney tissue(s) or breast, lung, colon or kidney cell type(s). For a number of disorders of the above tissues or cells, particularly cancer of the breast, lung, colon and kidney, expression of this gene at significantly higher or lower levels is detected in breast or lung or colon tissues or kidney tissues and cell types (e.g. breast cancer or lung cancer or colon cancer or kidney cancer) or bodily fluids comprising breast, lung, colon or kidney tissue or cells relative to the standard gene expression level, i.e., the expression level in healthy tissue or bodily fluid from an individual not having cancer.

[0099] The tissue distribution indicates that polynucleotides and polypeptides corresponding to these newly identified genes expressed in cancerous breast, lung, colon or kidney tissue are useful for the treatment/diagnosis of breast, lung, colon or kidney cancer depending on whether the sequence (listed in Table 1 and Tables 2 through 9 in Example 6) is expressed in cancerous tissue of breast, lung, colon or kidney origin. These proteins identified above may also be involved in apoptosis or tissue differentiation and could accordingly be useful in cancer therapy. Protein, as well as, antibodies directed against the protein or polypeptide may show utility as a tumor marker and/or immunotherapy targets for the above breast, lung colon and kidney tissues.

[0100] The term “polypeptide” refers to a biopolymer compound made up of a single chain of amino acid residues linked by peptide bonds. The term “protein” as used herein may be synonymous with the term “polypeptide” or may refer, in addition, to a complex of two or more polypeptides.

[0101] The term “vector” refers to a nucleic acid construct designed for transfer between different host cells. An “expression vector” refers to a vector that has the ability to incorporate and express heterologous DNA fragments in a foreign cell. Many prokaryotic and eukaryotic expression vectors are commercially available. Selection of appropriate expression vectors is within the knowledge of those having skill in the art. Accordingly, an “expression cassette” or “expression vector” is a nucleic acid construct generated recombinantly or synthetically, with a series of specified nucleic acid elements that permit transcription of a particular nucleic acid in a target cell. The recombinant expression cassette can be incorporated into a plasmid, chromosome, mitochondrial DNA, plastid DNA, virus, or nucleic acid fragment. Typically, the recombinant expression cassette portion of an expression vector includes, among other sequences, a nucleic acid sequence to be transcribed and a promoter.

[0102] The term “plasmid” refers to a circular double-stranded (ds) DNA construct used as a cloning vector, and which forms an extrachromosomal self-replicating genetic element in many bacteria and some eukaryotes.

[0103] A “transcription regulatory region” or “promoter” refers to nucleic acid sequences that influence and/or promote initiation of transcription. Promoters are typically considered to include regulatory regions, such as enhancer or inducer elements. The promoter will generally be appropriate to the host cell in which the target gene is being expressed. The promoter, together with other transcriptional and translational regulatory nucleic acid sequences (also termed “control sequences”), is necessary to express any given gene. In general, the transcriptional and translational regulatory sequences include, but are not limited to, promoter sequences, ribosomal binding sites, transcriptional start and stop sequences, translational start and stop sequences, and enhancer or activator sequences.

[0104] A nucleic acid is “operably linked” when it is placed into a functional relationship with another nucleic acid sequence. For example, DNA for a presequence or secretory leader is operably linked to DNA for a polypeptide if it is expressed as a preprotein that participates in the secretion of the polypeptide; a promoter or enhancer is operably linked to a coding sequence if it affects the transcription of the sequence; or a ribosome binding site is operably linked to a coding sequence if it is positioned so as to facilitate translation. Generally, “operably linked” means that the DNA sequences being linked are contiguous, and, in the case of a secretory leader, contiguous and in reading frame. However, “operably linked” elements, e.g., enhancers, do not have to be contiguous. Linking is accomplished by ligation at convenient restriction sites. If such sites do not exist, the synthetic oligonucleotide adaptors or linkers are used in accordance with conventional practice.

[0105] The term “gene” means the segment of DNA involved in producing a polypeptide chain, which may or may not include regions preceding and following the coding region, e.g. 5′ untranslated (5′ UTR) or “leader” sequences and 3′ UTR or “trailer” sequences, as well as intervening sequences (introns) between individual coding segments (exons).

[0106] The term “sequence identity” means nucleic acid or amino acid sequence identity in two or more aligned sequences, aligned using a sequence alignment program.

[0107] The term “% homology” is used interchangeably herein with the term “% identity” and refers to the level of nucleic acid or amino acid sequence identity between two or more aligned sequences, when aligned using a sequence alignment program. For example, 70% homology means the same thing as 70% sequence identity determined by a defined algorithm, and accordingly a homologue of a given sequence has greater than 80% sequence identity over a length of the given sequence. Exemplary levels of sequence identity include, but are not limited to, 80, 85, 90 or 95% or more sequence identity to a given sequence, e.g., the coding sequence for lactoferrin, as described herein.

[0108] Exemplary computer programs which can be used to determine identity between two sequences include, but are not limited to, the suite of BLAST programs, e.g., BLASTN, BLASTX, and TBLASTX, BLASTP and TBLASTN, publicly available on the Internet at “www.ncbi.nlm.gov/BLAST/”. See, also, Altschul, S. F. et al., 1990 and Altschul, S. F. et al., 1997.

[0109] Sequence searches are typically carried out using the BLASTN program when evaluating a given nucleic acid sequence relative to nucleic acid sequences in the GenBank DNA Sequences and other public databases. The BLASTX program is preferred for searching nucleic acid sequences which have been translated in all reading frames against amino acid sequences in the GenBank Protein Sequences and other public databases. Both BLASTN and BLASTX are run using default parameters of an open gap penalty of 11.0, and an extended gap penalty of 1.0, and utilize the BLOSUM-62 matrix. [See, Altschul, et al., 1997.]

[0110] A preferred alignment of selected sequences in order to determine “% identity” between two or more sequences, is performed using for example, the CLUSTAL-W program in MacVector version 6.5, operated with default parameters, including an open gap penalty of 10.0, an extended gap penalty of 0.1, and a BLOSUM 30 similarity matrix.

[0111] A nucleic acid sequence is considered to be “selectively hybridizable” to a reference nucleic acid sequence if the two sequences specifically hybridize to one another under moderate to high stringency hybridization and wash conditions. Hybridization conditions are based on the melting temperature (Tm) of the nucleic acid binding complex or probe. For example, “maximum stringency” typically occurs at about Tm-5° C. (5° below the Tm of the probe); “high stringency” at about 5-10° below.the Tm; “intermediate stringency” at about 10-20° below the Tm of the probe; and “low stringency” at about 20-25° below the Tm. Functionally, maximum stringency conditions may be used to identify sequences having strict identity or near-strict identity with the hybridization probe; while high stringency conditions are used to identify sequences having about 80% or more. sequence identity with the probe.

[0112] Moderate and high stringency hybridization conditions are well known in the art (see, for example, Sambrook et al, 1989, Chapters 9 and 11, and in Ausubel et a., 1993, expressly incorporated by reference herein). An example of high stringency conditions includes hybridization at about 42° C. in 50% formamide, 5×SSC, 5×Denhardt's solution, 0.5% SDS and 100 μg/ml denatured carrier DNA followed by washing two times in 233 SSC and 0.5% SDS at room temperature and two additional times in 0.1 X SSC and 0.5% SDS at 42° C.

[0113] As used herein, “recombinant” includes reference to a cell or vector, that has been modified by the introduction of a heterologous nucleic acid sequence or that the cell is derived from a cell so modified. Thus, for example, recombinant cells express genes that are not found in identical form within the native (non-recombinant) form of the cell or express native genes that are otherwise abnormally expressed, under expressed or not expressed at all as a result of deliberate human intervention.

[0114] Terms “transformed”, “stably transformed” or “transgenic” with reference to a cell means the cell has a non-native (heterologous) nucleic acid sequence integrated into its genome which is maintained through two or more generations.

[0115] The term “expression” with respect to a protein or peptide refers to the process by which the protein or peptide is produced based on the nucleic acid sequence of a gene. The process includes both transcription and translation. The term “expression” may also be used with respect to the generation of RNA from a DNA sequence.

[0116] The term “introduced” in the context of inserting a nucleic acid sequence into a cell, means “transfection”, or “transformation” or “transduction” and includes the incorporation of a nucleic acid sequence into a eukaryotic or prokaryotic cell where the nucleic acid sequence may be incorporated into the genome of the cell (for example, chromosome, plasmid, plastid, or mitochondrial DNA), converted into an autonomous replicon, or transiently expressed (for example, transfected mRNA).

[0117] By “host cell” is meant a cell which contains a vector and supports the replication, and/or transcription or transcription and translation (expression) of the expression construct. Host cells for use in the present invention can be prokaryotic cells, such as E. coli, or eukaryotic cells such as yeast, plant, insect, amphibian, or mammalian cells. Host cells include progeny of a single host cell, and the progeny may not necessarily be completely identical (in morphology or in total DNA complement) to the original parent cell due to natural, accidental, or deliberate mutation and/or change. A host cell includes cells transfected or infected in vivo or in vitro with a polynucleotide of this invention.

[0118] The term “purifying” is used interchangeably with the term “isolating” and generally refers to the separation of a particular component from other components of the environment in which it was found or produced.

[0119] “Heterologous DNA” or “foreign DNA” refers to DNA which has been introduced into cells from another source, or which is from a source, including the same source, but which is under the control of a promoter or terminator that does not normally regulate expression of the heterologous DNA.

[0120] “Heterologous protein” is a protein, including a polypeptide, encoded by a heterologous DNA.

[0121] A “signal/targeting/transport sequence” is an N- or C-terminal polypeptide sequence which is effective to localize the polypeptide or protein to which it is attached to a selected intracellular or extracellular region, including an intracellular vacuole or other protein storage body, chloroplast, mitochondria, or endoplasmic reticulum.

[0122] A “product” encoded by a DNA molecule includes, for example, RNA molecules and polypeptides.

[0123] A DNA sequence is “derived from” a gene if it corresponds in sequence to a segment or region of that gene. Segments of genes which may be derived from a gene include the promoter region, the 5′ untranslated region, and the 3′ untranslated region of the gene.

[0124] Therefore, polynucleotides and polypeptides of the invention are useful as reagents for differential identification of the tissue(s) or cell type(s) present in a biological sample and for diagnosis of diseases and conditions which include, but are not limited to, tumors, particularly, those found in the breast, lung, colon or kidney (the tissue type will depend on which polynucleotide or polypeptide is at issue).

[0125] Similarly, polypeptides and antibodies directed to these polypeptides are useful in providing immunological probes for differential identification of breast, lung, colon or kidney tissue(s) or cell type(s).

[0126] The proteins identified herein may also be involved in apoptosis or tissue differentiation and as such could be useful in breast, lung, colon or kidney cancer therapy, respectively. Protein, as well as, antibodies directed against the protein may show utility as a tumor marker and/or immunotherapy targets for the above listed tissues.

[0127] Diagnostic applications for the 385 polynucleotides identified respectively in the file “14dec03.ST25.txt” (generated by PatentIn3.2) attached to this application and incorporated by reference as listed herein in breast, lung, colon, and kidney cancer tissues include that the differentially expressed polynucleotide or polypeptide can be identified in patient tissue in order to identify the presence of a cancer in that patient. Identification of the differentially expressed polynucleotide or polypeptide can be accomplished by standard techniques known in the art for making such identification including, probe hybridization and antibody or ligand binding detection methods. All or part of the polynucleotide or polypeptide can be detected to make a positive identification.

[0128] Therapeutic applications for the 385 polynucleotides identified respectively in the file “14dec03.ST25.txt” (generated by PatentIn3.2) attached to this application and incorporated by reference as listed herein in breast, lung, colon, and kidney cancer tissues include blocking the expression of the gene or protein in vivo by administration of an appropriate blocking agent, such as known in the art, for example, but not limited to a polynucleotide (e.g antisense polynucleotide sequence), a ligand binding polypeptide, e.g. such as an antibody or binding portion of an antibody, a peptide, a small organic molecule, and the like, which can bind or interrupt the function of the target polynucleotide or expressed polypeptide molecule. All or part of the polynucleotide or polypeptide can be bound, blocked, arrested or interrupted in its function in the target cancer metabolism.

[0129] Table 1 summarizes the information corresponding to each “Unigene No.” (when available) described above and below. Included in the table are the Sequence ID No.s of the particular polynucleotide and the common name of the protein as well as the cancer tissue in which the polynucleotide has been discovered by the inventors as differentially expressed.

[0130] The translated amino acid sequence, can be easily translated using known molecular biology techniques. The polypeptides produced by these alternative open reading frames are specifically contemplated by the present invention.

[0131] The sequence ID No: and the translated sequence are sufficiently accurate and otherwise suitable for a variety of uses well known in the art and described further below. For instance, the sequence ID NO: is useful for designing nucleic acid hybridization probes that will detect nucleic acid sequences contained in the sequence ID NO:. These probes will also hybridize to nucleic acid molecules in biological samples, thereby enabling a variety of forensic and diagnostic methods of the invention. Similarly, polypeptides identified from translation of the sequences may be used to generate antibodies which bind specifically to the secreted proteins.

[0132] Nevertheless, DNA sequences generated by sequencing reactions can contain sequencing errors. The errors exist as misidentified nucleotides, or as insertions or deletions of nucleotides in the generated DNA sequence. The erroneously inserted or deleted nucleotides cause frame shifts in the reading frames of the predicted amino acid sequence. In these cases, the predicted amino acid sequence diverges from the actual amino acid sequence, even though the generated DNA sequence may be greater than 99.9% identical to the actual DNA sequence (for example, one base insertion or deletion in an open reading frame of over 1000 bases).

[0133] The present invention also relates to the genes corresponding to DNA sequences in the file “14dec03.ST25.txt” (generated by PatentIn3.2) attached to this application and incorporated. by reference or peptides and proteins translated from them. The corresponding gene can be isolated in accordance with known methods using the sequence information disclosed herein. Such methods include preparing probes or primers from the disclosed sequence and identifying or amplifying the corresponding gene from appropriate sources of genomic material.

[0134] Also provided in the present invention are species homologs. Species homologs may be isolated and identified by making suitable probes or primers from the sequences provided herein and screening a suitable nucleic acid source for the desired homologue.

[0135] The polypeptides of the invention can be prepared in any suitable manner. Such polypeptides include isolated naturally occurring polypeptides, recombinantly produced polypeptides, synthetically produced polypeptides, or polypeptides produced by a combination of these methods. Means for preparing such polypeptides are well understood in the art.

[0136] The polypeptides may be in the form of the secreted protein, including the mature form, or may be a part of a larger protein, such as a fusion protein (see below). It is often advantageous to include an additional amino acid sequence which contains secretory or leader sequences, pro-sequences, sequences which aid in purification, such as multiple histidine residues, or an additional sequence for stability during recombinant production.

[0137] The polypeptides of the present invention are preferably provided in an isolated form, and preferably are substantially purified. A recombinantly produced version of a polypeptide, including the secreted polypeptide, can be substantially purified by the one-step method described in Smith and Johnson, Gene 67:3140 (1988). Polypeptides of the invention also can be purified from natural or recombinant sources using antibodies of the invention raised against the secreted protein in methods which are well known in the art.

[0138] Polynucleotide and Polypeptide Variants

[0139] “Variant” refers to a polynucleotide or polypeptide differing from the polynucleotide or polypeptide of the present invention, but retaining essential properties thereof. Generally, variants are overall closely similar, and, in many regions, identical to the polynucleotide or polypeptide of the present invention.

[0140] By a polynucleotide having a nucleotide sequence at least, for example, 95% “identical” to a reference nucleotide sequence of the present invention, it is intended that the nucleotide sequence of the polynucleotide is identical to the reference sequence except that the polynucleotide sequence may include up to five point mutations per each 100 nucleotides of the reference nucleotide sequence encoding the polypeptide. In other words, to obtain a polynucleotide having a nucleotide sequence at least 95% identical to a reference nucleotide sequence, up to 5% of the nucleotides in the reference sequence may be deleted or substituted with another nucleotide, or a number of nucleotides up to 5% of the total nucleotides in the reference sequence may be inserted into the reference sequence.

[0141] As a practical matter, whether any particular nucleic acid molecule or polypeptide is at least 90%, 95%, 96%, 97%, 98% or 99% identical to a nucleotide sequence of the presence invention can be determined conventionally using known computer programs. A preferred method for determining the best overall match between a query sequence (a sequence of the present invention) and a subject sequence, also referred to as a global sequence alignment, can be determined using the FASTDB computer program based on the algorithm of Brutlag et al. (Comp. App. Biosci. (1990) 6:237-245). In a sequence alignment the query and subject sequences are both DNA sequences. An RNA sequence can be compared by converting U's to T's. The result of said global sequence alignment is in percent identity. Preferred parameters used in a FASTDB alignment of DNA sequences to calculate percent identity are: Matrix=Unitary, k-tuple=4, Mismatch Penalty=1, Joining Penalty=30, Randomization Group Length=0, Cutoff Score=1, Gap Penalty=5, Gap Size Penalty 0.05, Window Size=500 or the lenght of the subject nucleotide sequence, whichever is shorter.

[0142] If the subject sequence is shorter than the query sequence because of 5′ or 3′ deletions, not because of internal deletions, a manual correction must be made to the results. This is because the FASTDB program does not account for 5′ and 3′ truncations of the subject sequence when calculating percent identity. For subject sequences truncated at the 5′ or 3′ ends, relative to the query sequence, the percent identity is corrected by calculating the number of bases of the query sequence that are 5′ and 3′ of the subject sequence, which are not matched/aligned, as a percent of the total bases of the query sequence. Whether a nucleotide is matched/aligned is determined by results of the FASTDB sequence alignment. This percentage is then subtracted from the percent identity, calculated by the above FASTDB program using the specified parameters, to arrive at a final percent identity score. This corrected score is what is used for the purposes of the present invention. Only bases outside the 5′ and 3′ bases of the subject sequence, as displayed by the FASTDB alignment, which are not matched/aligned with the query sequence, are calculated for the purposes of manually adjusting the percent identity score.

[0143] For example, a 90 base subject sequence is aligned to a 100 base query sequence to determine percent identity. The deletions occur at the 5′ end of the subject sequence and therefore, the FASTDB alignment does not show a matched/alignment of the first 10 bases at 5′ end. The unpaired bases represent 10% of the sequence (number of bases at the 5′ and 3′ ends not matched/total number of bases in the query sequence) so 10% is subtracted from the percent identity score calculated by the FASTDB program. If the remaining 90 bases were perfectly matched the final percent identity would be 90%. In another example, a 90 base subject sequence is compared with a 100 base query sequence. This time the deletions are internal deletions so that there are no bases on the 5′ or 3′ of the subject sequence which are not matched/aligned with the query. In this case the percent identity calculated by FASTDB is not manually corrected. Once again, only bases 5′ and 3′ of the subject sequence which are not matched/aligned with the query sequence are manually corrected for. No other manual corrections are to be made for the purposes of the present invention.

[0144] By a polypeptide having an amino acid sequence at least, for example, 95% “identical” to a query amino acid sequence of the present invention, it is intended that the amino acid sequence of the subject polypeptide is identical to the query sequence except that the subject polypeptide sequence may include up to five amino acid alterations per each 100 amino acids of the query amino acid sequence. In other words, to obtain a polypeptide having an amino acid sequence at least 95% identical to a query amino acid sequence, up to 5% of the amino acid residues in the subject sequence may be inserted, deleted, (indels) or substituted with another amino acid. These alterations of the reference sequence may occur at the amino or carboxy terminal positions of the reference amino acid sequence or anywhere between those terminal positions, interspersed either individually among residues in the reference sequence or in one or more contiguous groups within the reference sequence.

[0145] As a practical matter, whether any particular polypeptide is at least 90%, 95%, 96%, 97%, 98% or 99% identical to, for instance, the amino acid sequences translated from the file “14dec03.ST25.txt” (generated by PatentIn3.2) attached to this application and incorporated by reference can be determined conventionally using known computer programs. A preferred method for determining the best overall match between a query sequence (a sequence of the present invention) and a subject sequence, also referred to as a global sequence alignment, can be determined using the FASTDB computer program based on the algorithm of Brutlag et al. (Comp. App. Biosci. (1990) 6:237-245). In a sequence alignment the query and subject sequences are either both nucleotide sequences or both amino acid sequences. The result of said global sequence alignment is in percent identity. Preferred parameters used in a FASTDB amino acid alignment are: Matrix=PAM 0, k-tuple=2, Mismatch Penalty=1, Joining Penalty=20, Randomization Group Length=0, Cutoff Score=I, Window Size=sequence length, Gap Penalty=5, Gap Size Penalty=0.05, Window Size=500 or the length of the subject amino acid sequence, whichever is shorter.

[0146] If the subject sequence is shorter than the query sequence due to N- or C-terminal deletions, not because of internal deletions, a manual correction must be made to the results. This is because the FASTDB program does not account for N- and C-terminal truncations of the subject sequence when calculating global percent identity. For subject sequences truncated at the N- and C-termini, relative to the query sequence, the percent identity is corrected by calculating the number of residues of the query sequence that are N- and C-terminal of the subject sequence, which are not matched/aligned with a corresponding subject residue, as a percent of the total bases of the query sequence. Whether a residue is matched/aligned is determined by results of the FASTDB sequence alignment. This percentage is then subtracted from the percent identity, calculated by the above FASTDB program using the specified parameters, to arrive at a final percent identity score. This final percent identity score is what is used for the purposes of the present invention. Only residues to the N- and C-termini of the subject sequence, which are not matched/aligned with the query sequence, are considered for the purposes of manually adjusting the percent identity score. That is, only query residue positions outside the farthest N- and C- terminal residues of the subject sequence.

[0147] For example, a 90 amino acid residue subject sequence is aligned with a 100 residue query sequence to determine percent identity. The deletion occurs at the N-terminus of the subject sequence and therefore, the FASTDB alignment does not show a matching/alignment of the first residues at the N-terminus. The 10 unpaired residues represent 10% of the sequence (number of residues at the N- and C-termini not matched/total number of residues in the query sequence) so 10% is subtracted from the percent identity score calculated by the FASTDB program. If the remaining 90 residues were perfectly matched the final percent identity would be 90%. In another example, a 90 residue subject sequence is compared with a 100 residue query sequence. This time the deletions are internal deletions so there are no residues at the N- or C-termini of the subject sequence which are not matched/aligned with the query. In this case the percent identity calculated by FASTDB is not manually corrected. Once again, only residue positions outside the N- and C-terminal ends of the subject sequence, as displayed in the FASTDB alignment, which are not matched/aligned with the query sequence are manually corrected. No other manual corrections are to be made for the purposes of the present invention.

[0148] The variants may contain alterations in the coding regions, non-coding regions, or both. Especially preferred are polynucleotide variants containing alterations which produce silent substitutions, additions, or deletions, but do not alter the properties or activities of the encoded polypeptide. Nucleotide variants produced by silent substitutions due to the degeneracy of the genetic code are preferred. Moreover, variants in which 5-10, 1-5, or 1-2 amino acids are substituted, deleted, or added in any combination are also preferred. Polynucleotide variants can be produced for a variety of reasons, e.g. to optimize codon expression for a particular host (change codons in the human mRNA to those preferred by a bacterial host such as E. coli).

[0149] Naturally occurring variants are called “allelic variants,” and refer to one of several alternate forms of a gene occupying a given locus on a chromosome of an organism. (Genes II, Lewin, B., ed., John Wiley & Sons, New York (1985).) These allelic variants can vary at either the polynucleotide and/or polypeptide level. Alternatively, non-naturally occurring variants may be produced by mutagenesis techniques or by direct synthesis.

[0150] Using known methods of protein engineering and recombinant DNA technology, variants may be generated to improve or alter the characteristics of the polypeptides of the present invention. For instance, one or more amino acids can be deleted from the N-terminus or C-terminus of the secreted protein without substantial loss of biological function. The authors of Ron et al., J. Biol. Chem. 268: 2984-2988 (1993), reported variant KGF proteins having heparin binding activity even after deleting 3, 8, or 27 amino-terminal amino acid residues. Similarly, interferon gamma exhibited up to ten times higher activity after deleting 8-10 amino acid residues from the carboxy terminus of this protein. (Dobeli et al., J. Biotechnology 7:199-216 (1988).) Moreover, ample evidence demonstrates that variants often retain a biological activity similar to that of the naturally occurring protein. For example, Gayle and coworkers (J. Biol. Chem 268:22105-22111 (1993)) conducted extensive mutational analysis of human cytokine IL-1a. They used random mutagenesis to generate over 3,500 individual IL-1a mutants that averaged 2.5 amino acid changes per variant over the entire length of the molecule. Multiple mutations were examined at every possible amino acid position. The investigators found that “[m]ost of the molecule could be altered with little effect on either [binding or biological activity].” (See, Abstract.) In fact, only 23 unique amino acid sequences, out of more than 3,500 nucleotide sequences examined, produced a protein that significantly differed in activity from wild-type.

[0151] Furthermore, even if deleting one or more amino acids from the N-terminus or C-terminus of a polypeptide results in modification or loss of one or more biological functions, other biological activities may still be retained. For example, the ability of a deletion variant to induce and/or to bind antibodies which recognize the secreted form will likely be retained when less than the majority of the residues of the secreted form are removed from the N-terminus or C-terminus. Whether a particular polypeptide lacking N- or C-terminal residues of a protein retains such immunogenic activities can readily be determined by routine methods described herein and otherwise known in the art.

[0152] Thus, the invention further includes polypeptide variants which show substantial biological activity. Such variants include deletions, insertions, inversions, repeats, and substitutions selected according to general rules known in the art so as have little effect on activity. For example, guidance concerning how to make phenotypically silent amino acid substitutions is provided in Bowie, J. U. et al., Science 247:1306-1310(1990), wherein the authors indicate that there are two main strategies for studying the tolerance of an amino acid sequence to change.

[0153] The first strategy exploits the tolerance of amino acid substitutions by natural selection during the process of evolution. By comparing amino acid sequences in different species, conserved amino acids can be identified. These conserved amino acids are likely important for protein function. In contrast, the amino acid positions where substitutions have been tolerated by natural selection indicates that these positions are not critical for protein function. Thus, positions tolerating amino acid substitution could be modified while still maintaining biological activity of the protein.

[0154] The second strategy uses genetic engineering to introduce amino acid changes at specific positions of a cloned gene to identify regions critical for protein function. For example, site directed mutagenesis or alanine-scanning mutagenesis (introduction of single alanine mutations at every residue in the molecule) can be used. (Cunningham and Wells, Science 244:1081-1085 (1989).) The resulting mutant molecules can then be tested for biological activity.

[0155] As the authors state, these two strategies have revealed that proteins are surprisingly tolerant of amino acid substitutions. The authors further indicate which amino acid changes are likely to be permissive at certain amino acid positions in the protein. For example, most buried (within the tertiary structure of the protein) amino acid residues require nonpolar side chains, whereas few features of surface side chains are generally conserved. Moreover, tolerated conservative amino acid substitutions involve replacement of the aliphatic or hydrophobic amino acids Ala, Val, Leu and lie; replacement of the hydroxyl residues Ser and Thr; replacement of the acidic residues Asp and Glu; replacement of the amide residues Asn and Gln, replacement of the basic residues Lys, Arg, and His; replacement of the aromatic residues Phe, Tyr, and Trp, and replacement of the small-sized amino acids Ala, Ser, Thr, Met, and Gly.

[0156] Besides conservative amino acid substitution, variants of the present invention include (i) substitutions with one or more of the non-conserved amino acid residues, where the substituted amino acid residues may or may not be one encoded by the genetic code, or (ii) substitution with one or more of amino acid residues having a substituent group, or (iii) fusion of the mature polypeptide with another compound, such as a compound to increase the stability and/or solubility of the polypeptide (for example, polyethylene glycol), or (iv) fusion of the polypeptide with additional amino acids, such as an IgG Fc fusion region peptide, or leader or secretory sequence, or a sequence facilitating purification. Such variant polypeptides are deemed to be within the scope of those skilled in the art from the teachings herein.

[0157] For example, polypeptide variants containing amino acid substitutions of charged amino acids with other charged or neutral amino acids may produce proteins with improved characteristics, such as less aggregation. Aggregation of pharmaceutical formulations both reduces activity and increases clearance due to the aggregate's immunogenic activity. (Pinckard et al., Clin. Exp. Immunol. 2:331-340 (1967); Robbins et al., Diabetes 36: 838-845 (1987); Cleland et al., Crit. Rev. Therapeutic Drug Carrier Systems 10:307-377 (1993).)

[0158] Polynucleotide and Polypeptide Fragments

[0159] In the present invention, a “polynucleotide fragment” refers to a short polynucleotide having a nucleic acid sequence contained in the sequence ID NO: The short nucleotide fragments are preferably at least about 15 nt (nt is nucleotides), and more preferably at least about 20 nt, still more preferably at least about 30 nt, and even more preferably, at least about 40 nt in length. A fragment “at least 20 nt in length,” for example, is intended to include 20 or more contiguous bases from the nucleotide sequence shown in the sequence ID NO:. These nucleotide fragments are useful as diagnostic probes and primers as discussed herein. Of course, larger fragments (e.g. 50, 150, 500, 600, 2000 nucleotides) are preferred.

[0160] Moreover, representative examples of polynucleotide fragments of the invention, include, for example, fragments having a sequence from about nucleotide number 1-50, 51-100, 101-150, 151-200, 201-250, 251-300, 301-350, 351-400, 401-450, 451-500, 501-550, 551-600, 651-700, 701-750, 751-800, 800-850, 851-900, 901-950, 951-1000, 1001-1050,1051-1100, 1101-1150, 1151-1200, 1201-1250, 1251-1300, 1301-1350, 1351-1400, 1401-1450, 1451-1500, 1501-1550, 1551-1600, 1601-1650, 1651-1700, 1701-1750, 1751-1800, 1801-1850, 1851-1900, 1901-1950, 1951-2000, or 2001 to the end of sequence ID NO:. In this context “about” includes the particularly recited ranges, larger or smaller by several (5, 4, 3, 2, or 1) nucleotides, at either terminus or at both termini. Preferably, these fragments encode a polypeptide which has biological activity. More preferably, these polynucleotides can be used as probes or primers as discussed herein.

[0161] In the present invention, a “polypeptide fragment” refers to a short amino acid sequence contained in a translation of the sequences in the file “14dec03.ST25.txt” (generated by PatentIn3.2) attached to this application and incorporated by reference. Protein fragments may be “free-standing,” or comprised within a larger polypeptide of which the fragment forms a part or region, most preferably as a single continuous region. Representative examples of polypeptide fragments of the invention, include, for example, fragments from about amino acid number 1-20, 21-40, 41-60, 61-80, 81-100, 102-120, 121-140, 141-160, or 161 to the coding region. Moreover, polypeptide fragments can be about 20, 30, 40, 50, 60, 70, 80, 90, 100, 110, 120, 130, 140, or 150 amino acids in length. In this context “about” includes the particularly recited ranges, larger or smaller by several (5, 4, 3, 2, or 1) amino acids, at either extreme or at both extremes.

[0162] Preferred polypeptide fragments include the secreted protein as well as the mature form. Further preferred polypeptide fragments include the secreted protein or the mature form having a continuous series of deleted residues from the amino or the carboxy terminus, or both. For example, any number of amino acids, ranging from 1-60, can be deleted from the amino terminus of either the secreted polypeptide or the mature form. Similarly, any number of amino acids, ranging from 1-30, can be deleted from the carboxy terminus of the secreted protein or mature form. Furthermore, any combination of the above amino and carboxy terminus deletions are preferred. Similarly, polynucleotide fragments encoding these polypeptide fragments are also preferred.

[0163] Also preferred are polypeptide and polynucleotide fragments characterized by structural or functional domains, such as fragments that comprise alpha-helix and alpha-helix forming regions, beta-sheet and beta-sheet-forming regions, turn and turn-forming regions, coil and coil-forming regions, hydrophilic regions, hydrophobic regions, alpha amphipathic regions, beta amphipathic regions, flexible regions, surface-forming regions, substrate binding region, and high antigenic index regions. Polypeptide fragments of falling within conserved domains are specifically contemplated by the present invention. Moreover, polynucleotide fragments encoding these domains are also contemplated.

[0164] Other preferred fragments are biologically active fragments. Biologically active fragments are those exhibiting activity similar, but not necessarily identical, to an activity of the polypeptide of the present invention. The biological activity of the fragments may include an improved desired activity, or a decreased undesirable activity.

[0165] Epitopes & Antibodies

[0166] In the present invention, “epitopes” refer to polypeptide fragments having antigenic or immunogenic activity in an animal, especially in a human. A preferred embodiment of the present invention relates to a polypeptide fragment comprising an epitope, as well as the polynucleotide encoding this fragment. A region of a protein molecule to which an antibody can bind is defined as an “antigenic epitope.” In contrast, an “immunogenic epitope” is defined as a part of a protein that elicits an antibody response. (See, for instance, Geysen et al., Proc. Natl. Acad. Sci. USA 81:3998-4002, 1983.)

[0167] Fragments which function as epitopes may be produced by any conventional means. (See, e.g. Houghten, R. A., Proc. Natl. Acad. Sci. USA 82:5131-5135 (1985) further described in U.S. Pat. No. 4,631,211.)

[0168] In the present invention, antigenic epitopes preferably contain a sequence of at least seven, more preferably at least nine, and most preferably between about 15 to about 30 amino acids. Antigenic epitopes are useful to raise antibodies, including monoclonal antibodies, that specifically bind the epitope. (See, for instance, Wilson et al., Cell 37:767-778 (1984); Sutcliffe, J. G. et al., Science 219:660-666 (1983).)

[0169] Similarly, immunogenic epitopes can be used to induce antibodies according to methods well known in the art. (See, for instance, Sutcliffe et al., supra; Wilson et al., supra; Chow, M. et al., Proc. Natl. Acad. Sci. USA 82:910-914; and Bittle, F. J. et al., J. Gen. Virol. 66:2347-2354 (1985).) A preferred immunogenic epitope includes the secreted protein. The immunogenic epitopes may be presented together with a carrier protein, such as an albumin, to an animal system (such as rabbit or mouse) or, if it is long enough (at least about 25 amino acids), without a carrier. However, immunogenic epitopes comprising as few as 8 to 10 amino acids have been shown to be sufficient to raise antibodies capable of binding to, at the very least, linear epitopes in a denatured polypeptide (e.g. in Western blotting.)

[0170] As used herein, the term “antibody” (Ab) or “monoclonal antibody” (Mab) is meant to include intact molecules as well as antibody fragments (such as, for example, Fab and F(ab′)2 fragments) which are capable of specifically binding to protein. Fab and F(ab′)2 fragments lack the Fc fragment of intact antibody, clear more rapidly from the circulation, and may have less non-specific tissue binding than an intact antibody. (Wahl et al., J. Nucl. Med. 24:316-325 (1983).) Thus, these fragments are preferred, as well as the products of a FAB or other immunoglobulin expression library. Moreover, antibodies of the present invention include chimeric, single chain, and humanized antibodies.

[0171] The invention includes an antibody or binding portion of an antibody that specifically binds a protein found in breast tissue, wherein the protein is an over expressed protein listed herein. Breast cancer diagnosis or prognosis can comprise contacting an antibody or binding portion of an antibody specific to an over expressed protein in breast cancer cells, with the over expressed protein for which the antibody or binding portion thereof is specific. Treatment for breast cancer can comprise blocking an over expressed protein in breast cancer, including those over expressed proteins mentioned herein, with an antibody specific for the over expressed protein.

[0172] The invention likewise provides an antibody or binding portion of an antibody that specifically binds a protein found in lung tissue, wherein the protein is an over expressed protein in lung cancer listed herein. Lung cancer diagnosis or prognosis can comprise contacting an antibody or binding portion of an antibody specific to an over expressed protein in lung cancer cells, with the over expressed protein for which the antibody or binding portion thereof is specific. Treatment for lung cancer can comprise blocking an over expressed protein in lung cancer, including those over expressed proteins mentioned herein, with an antibody specific for the over expressed protein.

[0173] The invention likewise provides an antibody or binding portion of an antibody that specifically binds a protein found in colon tissue, wherein the protein is an over expressed protein in colon cancer listed herein. Colon cancer diagnosis or prognosis can comprise contacting an antibody or binding portion of an antibody specific to an over expressed protein in colon cancer cells, with the over expressed protein for which the antibody or binding portion thereof is specific. Treatment for colon cancer can comprise blocking an over expressed protein in colon cancer, including those over expressed proteins mentioned herein, with an antibody specific for the over expressed protein.

[0174] The invention likewise provides an antibody or binding portion of an antibody that specifically binds a protein found in kidney tissue, wherein the protein is an over expressed protein in kidney cancer listed herein. Kidney cancer diagnosis or prognosis can comprise contacting an antibody or binding portion of an antibody specific to an over expressed protein in kidney cancer cells, with the over expressed protein for which the antibody or binding portion thereof is specific. Treatment for kidney cancer can comprise blocking an over expressed protein in kidney cancer, including those over expressed proteins mentioned herein, with an antibody specific for the over expressed protein.

[0175] Manufacture of antibodies can be accomplished by standard antibody techniques known in the art. Diagnosis using antibodies generated to specific proteins or polypeptides can be accomplished, for example, by removing a sample of the tumor tissue or other body material or fluid from the patient and contacting the antibody with the patient's material. Diagnosis standards can be established for each protein and cancer type, as is standardly developed in the art. Treatments can be accomplished after establishing an effective dose of antibody for the particular patient or cancer or protein being targeted. Treatment efficacy can be determined based on any number of parameters including reduction of target protein, reduction of tumor size, or stabilization of disease.

[0176] Fusion Proteins

[0177] Any polypeptide of the present invention can be used to generate fusion proteins. For example, the polypeptide of the present invention, when fused to a second protein, can be used as an antigenic tag. Antibodies raised against the polypeptide of the present invention can be used to indirectly detect the second protein by binding to the polypeptide. Moreover, because secreted proteins target cellular locations based on trafficking signals, the polypeptides of the present invention can be used as targeting molecules once fused to other proteins.

[0178] Examples of domains that can be fused to polypeptides of the present invention include not only heterologous signal sequences, but also other heterologous functional regions. The fusion does not necessarily need to be direct, but may occur through linker sequences.

[0179] Moreover, fusion proteins may also be engineered to improve characteristics of the polypeptide of the present invention. For instance, a region of additional amino acids, particularly charged amino acids, may be added to the N-terminus of the polypeptide to improve stability and persistence during purification from the host cell or subsequent handling and storage. Also, peptide moieties may be added to the polypeptide to facilitate purification. Such regions may be removed prior to final preparation of the polypeptide. The addition of peptide moieties to facilitate handling of polypeptides are familiar and routine techniques in the art.

[0180] Moreover, polypeptides of the present invention, including fragments, and specifically epitopes, can be combined with parts of the constant domain of immunoglobulins (IgG), resulting in chimeric polypeptides. These fusion proteins facilitate purification and show an increased half-life in vivo. One reported example describes chimeric proteins consisting of the first two domains of the human CD4-polypeptide and various domains of the constant regions of the heavy or light chains of mammalian immunoglobulins. (EP A 394,827; Traunecker et al., Nature 331:84-86 (1988).) Fusion proteins having disulfide-linked dimeric structures (due to the IgG) can also be more efficient in binding and neutralizing other molecules, than the monomeric secreted protein or protein fragment alone. (Fountoulakis et al., J. Biochem. 270:3958-3964 (1995).). Similarly, EP-A-O 464 533 (Canadian counterpart 2045869) discloses fusion proteins comprising various portions of constant region of immunoglobulin molecules together with another human protein or part thereof. In many cases, the Fc part in a fusion protein is beneficial in therapy and diagnosis, and thus can result in, for example, improved pharnacokinetic properties. (EP-A 0232 262.) Alternatively, deleting the Fc part after the fusion protein has been expressed, detected, and purified, would be desired. For example, the Fc portion may hinder therapy and diagnosis if the fusion protein is used as an antigen for immunizations. In drug discovery, for example, human proteins, such as hlL-5, have been fused with Fc portions for the purpose of high-throughput screening assays to identify antagonists of hlL-5. (See, D. Bennett et al., J. Molecular Recognition 8:52-58 ,1995; K. Johanson et al., J. Biol. Chem. 270:9459-9471, 1995.)

[0181] Moreover, the polypeptides of the present invention can be fused to marker sequences, such as a peptide which facilitates purification of the fused polypeptide. In preferred embodiments, the marker amino acid sequence is a hexa-histidine peptide, such as the tag provided in a pQE vector (QIAGEN, Inc., 9259 Eton Avenue, Chatsworth, Calif., 91311), among others, many of which are commercially available. As described in Gentz et al., Proc. Natl. Acad. Sci. USA 86:821-824 (1989), for instance, hexa-histidine provides for convenient purification of the fusion protein. Another peptide tag useful for purification, the “HA” tag, corresponds to an epitope derived from the influenza hemagglutinin protein. (Wilson et al., Cell 37:767 (1984).) Thus, any of these above fusions can be engineered using the polynucleotides or the polypeptides of the present invention.

[0182] Vectors. Host Cells, and Protein Production

[0183] The present invention also relates to vectors containing the polynucleotide of the present invention, host cells, and the production of polypeptides by recombinant techniques. The vector may be, for example, a phage, plasmid, viral, or retroviral vector. Retroviral vectors may be replication competent or replication defective. In the latter case, viral propagation generally will occur only in complementing host cells.

[0184] The polynucleotides may be joined to a vector containing a selectable marker for propagation in a host. Generally, a plasmid vector is introduced in a precipitate, such as a calcium phosphate precipitate, or in a complex with a charged lipid. If the vector is a virus, it may be packaged in vitro using an appropriate packaging cell line and then transduced into host cells.

[0185] The polynucleotide insert should be operatively linked to an appropriate promoter, such as the phage lambda PL promoter, the E. coli lac, trp, phoA and tac promoters, the SV40 early and late promoters and promoters of retroviral LTRs, to name a few. Other suitable promoters will be known to the skilled artisan. The expression constructs will further contain sites for transcription initiation, termination, and, in the transcribed region, a ribosome binding site for translation. The coding portion of the transcripts expressed by the constructs will preferably include a translation initiating codon at the beginning and a termination codon (UAA, UGA or UAG) appropriately positioned at the end of the polypeptide to be translated.

[0186] As indicated, the expression vectors will preferably include at least one selectable marker. Such markers include dihydrofolate reductase, G418 or neomycin resistance for eukaryotic cell culture and tetracycline, kanamycin or ampicillin resistance genes for culturing in E. coli and other bacteria. Representative examples of appropriate hosts include, but are not limited to, bacterial cells, such as E. coli, Streptomyces and Salmonella typhimurium cells; fungal cells, such as yeast cells; insect cells such as Drosophila S2 and Spodoptera Sf9 cells; animal cells such as CHO, COS, 293, and Bowes melanoma cells; and plant cells. Appropriate culture mediums and conditions for the above-described host cells are known in the art.

[0187] Among vectors preferred for use in bacteria include pQE70, pQE60 and pQE-9, available from QIAGEN, Inc.; pBluescript vectors, Phagescript vectors, pNH8A, pNH16a, pNH18A, pNH46A, available from Stratagene Cloning Systems, Inc.; and ptrc99a, pKK223-3, pKK233-3, pDR540, pRIT5 available from Pharmacia Biotech, Inc. Among preferred eukaryotic vectors are pWLNEO, pSV2CAT, pOG44, pXT1 and pSG available from Stratagene; and pSVK3, pBPV, pMSG and pSVL available from Pharmacia. Other suitable vectors will be readily apparent to the skilled artisan.

[0188] Introduction of the construct into the host cell can be effected by calcium phosphate transfection, DEAE-dextran mediated transfection, cationic lipid-mediated transfection, electroporation, transduction, infection, or other methods. Such methods are described in many standard laboratory manuals, such as Davis et al., Basic Methods In Molecular Biology (1986). It is specifically contemplated that the polypeptides of the present invention may in fact be expressed by a host cell lacking a recombinant vector.

[0189] A polypeptide of this invention can be recovered and purified from recombinant cell cultures by well-known methods including ammonium sulfate or ethanol precipitation, acid extraction, anion or cation exchange chromatography, phosphocellulose chromatography, hydrophobic interaction chromatography, affinity chromatography, hydroxylapatite chromatography and lectin chromatography. Most preferably, high performance liquid chromatography (“HPLC”) is employed for purification.

[0190] Polypeptides of the present invention, and preferably the secreted form, can also be recovered from: products purified from natural sources, including bodily fluids, tissues and cells, whether directly isolated or cultured; products of chemical synthetic procedures; and products produced by recombinant techniques from a prokaryotic or eukaryotic host, including, for example, bacterial, yeast, higher plant, insect, and mammalian cells. Depending upon the host employed in a recombinant production procedure, the polypeptides of the present invention may be glycosylated or may be non-glycosylated. In addition, polypeptides of the invention may also include an initial modified methionine residue, in some cases as a result of host-mediated processes. Thus, it is well known in the art that the N-terminal methionine encoded by the translation initiation codon generally is removed with high efficiency from any protein after translation in all eukaryotic cells. While the N-terminal methionine on most proteins also is efficiently removed in most prokaryotes, for some proteins, this prokaryotic removal process is inefficient, depending on the nature of the amino acid to which the N-terminal methionine is covalently linked.

[0191] Uses of the Polynucleotides

[0192] Each of the polynucleotides identified herein can be used in numerous ways as reagents. The following description should be considered exemplary and utilizes known techniques.

[0193] The polynucleotides of the present invention are useful for chromosome identification. There exists an ongoing need to identify new chromosome markers, since few chromosome marking reagents, based on actual sequence data (repeat polymorphisms), are presently available. Each polynucleotide of the present invention can be used as a chromosome marker.

[0194] Briefly, sequences can be mapped to chromosomes by preparing PCR primers (preferably 15-25 bp) from the sequences shown in the file “14dec03.ST25.txt” (generated by PatentIn3.2) attached to this application and incorporated by reference. Primers can be selected using computer analysis so that primers do not span more than one predicted exon in the genomic DNA. These primers are then used for PCR screening of somatic cell hybrids containing individual human chromosomes. Only those hybrids containing the human gene corresponding to the file “14dec03.ST25.txt” (generated by PatentIn3.2) attached to this application and incorporated by reference will yield an amplified fragment.

[0195] Similarly, somatic hybrids provide a rapid method of PCR mapping the polynucleotides to particular chromosomes. Three or more clones can be assigned per day using a single thermal cycler. Moreover, sublocalization of the polynucleotides can be achieved with panels of specific chromosome fragments. Other gene mapping strategies that can be used include in situ hybridization, prescreening with labeled flow-sorted chromosomes, and preselection by hybridization to construct chromosome specific-cDNA libraries.

[0196] Precise chromosomal location of the polynucleotides can also be achieved using fluorescence in situ hybridization (FISH) of a metaphase chromosomal spread. This technique uses polynucleotides as short as 500 or 600 bases; however, polynucleotides 2,000-4,000 bp are preferred. For a review of this technique, see Verma et al., “Human Chromosomes: a Manual of Basic Techniques,” Pergamon Press, New York (1988).

[0197] For chromosome mapping, the polynucleotides can be used individually (to mark a single chromosome or a single site on that chromosome) or in panels (for marking multiple sites and/or multiple chromosomes). Preferred polynucleotides correspond to the noncoding regions of the cDNAs because the coding sequences are more likely conserved within gene families, thus increasing the chance of cross hybridization during chromosomal mapping.

[0198] Once a polynucleotide has been mapped to a precise chromosomal location, the physical position of the polynucleotide can be used in linkage analysis. Linkage analysis establishes coinheritance between a chromosomal location and presentation of a particular disease. (Disease mapping data are found, for example, in V. McKusick, “Mendelian Inheritance in Man” available on line through Johns Hopkins University Welch Medical Library). Assuming 1 megabase mapping resolution and one gene per 20 kb, a cDNA precisely localized to a chromosomal region associated with the disease could be one of 50-500 potential causative genes.

[0199] Thus, once coinheritance is established, differences in the polynucleotide and the corresponding gene between affected and unaffected individuals can be examined. First, visible structural alterations in the chromosomes, such as deletions or translocations, are examined in chromosome spreads or by PCR. If no structural alterations exist, the presence of point mutations are ascertained. Mutations observed in some or all affected individuals, but not in normal individuals, indicates that the mutation may cause the disease. However, complete sequencing of the polypeptide and the corresponding gene from several normal individuals is required to distinguish the mutation from a polymorphism. If a new polymorphism is identified, this polymorphic polypeptide can be used for further linkage analysis

[0200] Furthermore, increased or decreased expression of the gene in affected individuals as compared to unaffected individuals can be assessed using polynucleotides of the present invention. Any of these alterations (altered expression, chromosomal rearrangement, or mutation) can be used as a diagnostic or prognostic marker.

[0201] In addition to the foregoing, a polynucleotide can be used to control gene expression through triple helix formation or antisense DNA or RNA. Both methods rely on binding of the polynucleotide to DNA or RNA. For these techniques, preferred polynucleotides are usually 20 to 40 bases in length and complementary to either the region of the gene involved in transcription (triple helix—see Lee et al., Nucl. Acids Res. 6:3073 (1979); Cooney et al., Science 241:456 (1988); and Dervan et al., Science 251:1360 (1991) ) or to the mRNA itself (antisense—Okano, J. Neurochem. 56:560 (1991); Oligodeoxy-nucleotides as Antisense Inhibitors of Gene Expression, CRC Press, Boca Raton, Fla. (1988).) Triple helix formation optimally results in a shut-off of RNA transcription from DNA, while antisense RNA hybridization blocks translation of an mRNA molecule into polypeptide. Both techniques are effective in model systems, and the information disclosed herein can be used to design antisense or triple helix polynucleotides in an effort to treat disease.

[0202] Polynucleotides of the present invention are also useful in gene therapy. One goal of gene therapy is to insert a normal gene into an organism having a defective gene, in an effort to correct the genetic defect. The polynucleotides disclosed in the present invention offer a means of targeting such genetic defects in a highly accurate manner. Another goal is to insert a new gene that was not present in the host genome, thereby producing a new trait in the host cell.

[0203] There is also a need for reagents capable of identifying the source of a particular tissue. Such need arises, for example, in forensics when presented with tissue of unknown origin. Appropriate reagents can comprise, for example, DNA probes or primers specific to particular tissue prepared from the sequences of the present invention. Panels of such reagents can identify tissue by species and/or by organ type. In a similar fashion, these reagents can be used to screen tissue cultures for contamination.

[0204] In the very least, the polynucleotides of the present invention can be used as molecular weight markers on Southern gels, as diagnostic probes for the presence of a specific mRNA in a particular cell type, as a probe to “subtract-out” known sequences in the process of discovering novel polynucleotides, for selecting and making oligomers for attachment to a “gene chip” or other support, to raise anti-DNA antibodies using DNA immunization techniques, and as an antigen to elicit an immune response.

[0205] Uses of the Polynucleotides in Microarrays

[0206] The invention provides a prepared solid support comprising immobilized and separate groups of oligonucleotide or cDNA probes. Each probe group corresponds to a particular region within the reference sequence. The probes can be selected or designed using for example a standard PCR probe selection program such as Probe3 from Massachusetts Institute of Technology (MIT).

[0207] The solid phase support can provide an area of about 5 to about 100 square micrometers, on which up to about 100,000 groups of probes can be immobilized in discrete areas according to a predetermined pattern. The prepared solid support can have an associated written or electronic record of the sequence of the probe or probe pairs at any given location on the support, and thus the location on the support of an amplified target can be identified as well. It is understood that a nucleic acid probe of the present invention may contain minor deletions, additions and/or substitutions of nucleic acid bases, to the extent that such alterations do not negatively affect the yield or product obtained to a significant degree.

[0208] Oligonucleotide or cDNA probes can include the naturally occurring heterocyclic bases normally found in nucleic acids (uracil, cytosine, thymine, adenine and guanine), as well as modified bases and base analogues. Any modified base or base analogue compatible with hybridization of the probe to a target sequence is useful in the practice of the invention. The sugar or glycoside portion of the probe can comprise deoxyribose, ribose, and/or modified forms of these sugars, such as, for example, 2′-O-alkyl ribose. In a preferred embodiment, the sugar moiety is 2′-deoxyribose; however, any sugar moiety that is compatible with the ability of the probe to hybridize to a target sequence can be used.

[0209] In one embodiment, the nucleoside units of the probe are linked by a phosphodiester backbone, as is well known in the art. In additional embodiments, internucleotide linkages can include any linkage known to one of skill in the art that is compatible with specific hybridization of the probe including, but not limited to phosphorothioate, methylphosphonate, sulfamate (e.g., U.S. Pat. No. 5,470,967) and polyamide (i.e., peptide nucleic acids). Peptide nucleic acids are described in Nielsen et al. (1991) Science 254: 1497-1500, U.S. Pat. No. 5,714,331, and Nielsen (1999) Curr. Opin. Biotechnol. 10:71-75.

[0210] In certain embodiments, the probe can be a chimeric molecule; i.e., can comprise more than one type of base or sugar subunit, and/or the linkages can be of more than one type within the same probe.

[0211] The probe can comprise a moiety to facilitate hybridization to its target sequence, as are known in the art, for example, intercalators and/or minor groove binders.

[0212] Variations of the bases, sugars, and internucleoside backbone, as well as the presence of any pendant group on the probe, will be compatible with the ability of the probe to bind, in a sequence-specific fashion, with its target sequence. A large number of structural modifications, both known and to be developed, are possible within these bounds. Moreover, synthetic methods for preparing the various heterocyclic bases, sugars, nucleosides and nucleotides which form the probe, and preparation of oligonucleotides of specific predetermined sequence, are well-developed and known in the art. A preferred method for oligonucleotide synthesis incorporates the teaching of U.S. Pat. No. 5,419,966.

[0213] Modified oligonucleotides, representing novel sequences and optimized for DNA microarray analysis, are spotted on DNA microarray slides. The microarray slides of the present invention can be of any solid materials and structures suitable for supporting nucleotide hybridization and synthesis. Preferably, the solid phase support comprises at least one substantially rigid surface on which the primers can be immobilized. The solid phase support can be made of, for example, glass, synthetic polymer, plastic, hard non-mesh nylon or ceramic. Other suitable solid support materials are known and readily available to those of skill in the art. The size of the solid support can be any of the standard microarray sizes, useful for DNA microarray technology, and the size may be tailored to fit the particular machine being used to conduct a reaction of the invention. Methods and materials for derivatization of solid phase supports for the purpose of immobilizing oligonucleotides are known to those skill in the art and described in, for example, U.S. Pat. No. 5,919,523, the disclosure of which is incorporated herein by reference.

[0214] The oligonucleotide primers of the invention are affixed, immobilized, provided, and/or applied to the surface of the solid support using any available means to fix, immobilize, provide and/or apply the oligonucleotides at a particular location on the solid support. For example, photolithography (Affymetrix, Santa Clara, Calif.) can be used to apply the oligonucleotide primers at particular position on a chip or solid support, as described in the U.S. Pat. Nos. 5,919,523, 5,837,832, 5,831,070, and 5,770,722, which are incorporated herein by reference. The oligonucleotide primers may also be applied to a solid support as described in Brown and Shalon, U.S. Pat. No. 5,807,522 (1998). Additionally, the primers may be applied to a solid support using a robotic system, such as one manufactured by Genetic MicroSystems (Woburn, Mass.), GeneMachines (San Carlos, Calif.) or Cartesian Technologies (Irvine, Calif.).

[0215] The target polynucleotides can be detected by using labeled nucleotides (e.g. dNTP-fluorescent label for direct labeling; dNTP-biotin or dNTP-digoxigenin for indirect labeling) incorporated into DNA during the PCR or by other means. For indirectly labeled DNA, the detection may be carried out by fluorescence or other enzyme conjugated streptavidin or anti-digoxigenin antibodies. The PCR method employs detection of the polynucleotides by detecting incorporated label in the newly synthesized complements to the polynucleotide targets. For this purpose, any label that can be incorporated into DNA as it is synthesized can be used, e.g. fluoro-dNTP, biotin-dNTP, or digoxigenin-dNTP, as described above and are known in the art.

[0216] Examples of suitable fluorescent labels include fluorescein (FITC), 5,6-carboxymethyl fluorescein, Texas red, nitrobenz-2-oxa-1, 3-diazol-4-yl (NBD), coumarin, dansyl chloride, rhodamine, 4′-6-diamidino-2-phenylinodole (DAPI), and the cyanine dyes Cy3, Cy3.5, Cy5, Cy5.5 and Cy7. Preferred fluorescent labels are fluorescein (5-carboxyfluorescein-N-hydroxysuccinimide ester) and rhodamine (5,6-tetramethyl rhodamine). Preferred fluorescent labels for combinatorial multicolor coding are FITC and the cyanine dyes Cy3, Cy3.5, Cy5, Cy5.5 and Cy7. The absorption and emission maxima, respectively, for these fluors are: FITC (490 nm; 520 nm), Cy3 (554 nm; 568 nm), Cy3.5 (581 nm; 588 nm), Cy5 (652 nm: 672 nm), Cy5.5 (682 nm; 703 nm) and Cy7 (755 nm; 788 nm), thus allowing their simultaneous detection. The fluorescent labels can be obtained from a variety of commercial sources, including Molecular Probes, Eugene, Oreg. and Research Organics, Cleveland, Ohio.

[0217] Labeled nucleotides are the preferred form of detection label since they can be directly incorporated during synthesis. Examples of detection labels that can be incorporated into amplified DNA or RNA include nucleotide analogs such as BrdUrd (Hoy and Schimke, Mutation Research 290:217-230 (1993)), BrUTP (Wansick et al., J. Cell Biology 122:283-293 (1993)) and nucleotides modified with biotin (Langer et al., Proc. Natl. Acad. Sci. USA 78:6633 (1981)) or with suitable haptens such as digoxygenin (Kerkhof, Anal. Biochem. 205:359-364 (1992)). Suitable fluorescence-labeled nucleotides are Fluorescein-isothiocyanate-dUTP, Cyanine-3-dUTP and Cyanine-5-dUTP (Yu et al., Nucleic Acids Res., 22:3226-3232 (1994)). A preferred nucleotide analog detection label for DNA is BrdUrd (BUDR triphosphate, Sigma), and a preferred nucleotide analog detection label for RNA is Biotin-16-uridine-5′-triphosphate (Biotin-16-dUTP, Boehringher Mannheim). Fluorescein, Cy3, and Cy5 can be linked to dUTP for direct labelling. Cy3.5 and Cy7 are available as avidin or anti-digoxygenin conjugates for secondary detection of biotin- or digoxygenin-labeled probes.

[0218] Comparing Differential Expression of Target Polynucleotides from Different Biological Sources.

[0219] For most studies involving gene expression, RNA is isolated from specific tissue samples. This RNA is then subjected to reverse transcription using oligo-dT primers and fluorescently labeled dNTPs (usually Cy3 or Cy5 labeled dCTP) resulting in a DNA probe that is fluorescently labeled and has a complementary sequence to the original mRNA. The next step is to hybridize the probe to the immobilized target DNA attached to the microarray. This is done by denaturing the probe with heat or a mild base, to reduce secondary structures that may have formed, and applying it onto the microarray. A cover slip is applied to the array to ensure even distribution of the probe. The array is placed in a warm, humidified chamber overnight to allow the single stranded probe DNA to bind to its complementary single stranded target. The microarray is then removed and washed to remove any nonspecifically bound probe. The arrays are then imaged with a confocal laser scanner. The scanner contains 2 lasers tuned to excite the dye incorporated into the DNA probe and a corresponding filter set to select out excitation emission from the dye (Cy3 or Cy5). The ability to image two fluorescent signals allows for two different RNA samples to be hybridized and directly compared on the same array. This excitation emission signal is recorded via a photomultiplier tube (PMT), digitized, and sent to the computer for later analysis. By examining the intensity of a spot's fluorescence, and the ratio of fluorescence between spots, it possible to determine whether a specific gene is being expressed and the relative expression level of the gene between samples. Other available means for labeling and detecting probes, such as with radioisotopes, enzymes, antibodies, biotin, avidin and like materials known in the art, are within the contemplated means of executing the process.

[0220] Uses of the Polypeptides

[0221] Each of the polypeptides identified herein can be used in numerous ways. The following description should be considered exemplary and utilizes known techniques.

[0222] A polypeptide of the present invention can be used to assay protein levels in a biological sample using antibody-based techniques. For example, protein expression in tissues can be studied with classical immunohistological methods. (Jalkanen, M., et al., J. Cell. Biol. 101:976-985 (1985); Jalkanen, M., et al., J. Cell. Biol. 105:3087-3096 (1987).) Other antibody-based methods useful for detecting protein gene expression include immunoassays, such as the enzyme linked immunosorbent assay (ELISA) and the radioimmunoassay (RIA). Suitable antibody assay labels are known in the art and include enzyme labels, such as, glucose oxidase, and radioisotopes, such as iodine (¹²⁵I, ¹²¹I), carbon (¹⁴C), sulfur (³⁵S), tritium (³H), indium (¹¹²In), and technetium (^{99m}Tc), and fluorescent labels, such as fluorescein and rhodamine, or using biotin as a linker to these labels.

[0223] In addition to assaying secreted protein levels in a biological sample, proteins can also be detected in vivo by imaging. Antibody labels or markers for in vivo imaging of protein include those detectable by X-radiography, NMR or ESR. For X-radiography, suitable labels include radioisotopes such as barium or cesium, which emit detectable radiation but are not overtly harmful to the subject. Suitable markers for NMR and ESR include those with a detectable characteristic spin, such as deuterium, which may be incorporated into the antibody by labeling of nutrients for the relevant hybridoma.

[0224] A protein-specific antibody or antibody fragment which has been labeled with an appropriate detectable imaging moiety, such as a radioisotope (for example, ¹³¹I, ¹¹²In, ^{99m}Tc), a radio-opaque substance, or a material detectable by nuclear magnetic resonance, is introduced (for example, parenterally, subcutaneously, or intraperitoneally) into the mammal. It will be understood in the art that the size of the subject and the imaging system used will determine the quantity of imaging moiety needed to produce diagnostic images. In the case of a radioisotope moiety, for a human subject, the quantity of radioactivity injected will normally range from about 5 to 20 millicuries of ^{99m}Tc. The labeled antibody or antibody fragment will then preferentially accumulate at the location of cells which contain the specific protein. In vivo tumor imaging is described in S. W. Burchiel et al., “Immunopharmacokinetics of Radiolabeled Antibodies and Their Fragments.” (Chapter 13 in Tumor Imaging: The Radiochemical Detection of Cancer, S. W. Burchiel and B. A. Rhodes, eds., Masson Publishing Inc.,1982.)

[0225] Thus, the invention provides a diagnostic method of a disorder, which involves (a) assaying the expression of a polypeptide of the present invention in cells or body fluid of an individual; (b) comparing the level of gene expression with a standard gene expression level, whereby an increase or decrease in the assayed polypeptide gene expression level compared to the standard expression level is indicative of a disorder.

[0226] Moreover, polypeptides of the present invention can be used to treat disease. For example, patients can be administered a polypeptide of the present invention in an effort to replace absent or decreased levels of the polypeptide (e.g. insulin), to supplement absent or decreased levels of a different polypeptide (e.g. hemoglobin S for hemoglobin B), to inhibit the activity of a polypeptide (e.g. an oncogene), to activate a polypeptide (e.g. by binding to a receptor), to reduce the activity of a membrane bound receptor by competing with it for free ligand (e.g. soluble TNF receptors used in reducing inflammation), or to bring about a desired response (e.g. blood vessel growth).

[0227] Similarly, antibodies directed to a polypeptide of the present invention can also be used to treat disease. For example, administration of an antibody directed to a polypeptide of the present invention can bind and reduce overproduction of the polypeptide. Similarly, administration of an antibody can activate the polypeptide, such as by binding to a polypeptide bound to a membrane (receptor).

[0228] At the very least, the polypeptides of the present invention can be used as molecular weight markers on SDS-PAGE gels or on molecular sieve gel filtration columns using methods well known to those of skill in the art. Polypeptides can also be used to raise antibodies, which in turn are used to measure protein expression from a recombinant cell, as a way of assessing transformation of the host cell. Moreover, the polypeptides of the present invention can be used to test the following biological activities.

[0229] Biological Activities

[0230] The polynucleotides and polypeptides of the present invention can be used in assays to test for one or more biological activities. If these polynucleotides and polypeptides do exhibit activity in a particular assay, it is likely that these molecules may be involved in the diseases associated with the biological activity. Thus, the polynucleotides and polypeptides could be used to treat the associated disease.

[0231] Hyperproliferative Disorders

[0232] A polypeptide or polynucleotide can be used to treat or detect hyperproliferative disorders, including neoplasms, specifically those found in breast, lung, colon or kidney tissue depending on the polynucleotide or polypeptide being referenced. A polypeptide or polynucleotide of the present invention may inhibit the proliferation of the disorder through direct or indirect interactions. Alternatively, a polypeptide or polynucleotide of the present invention may enhance the proliferation of other cells which can inhibit the hyperproliferative disorder.

[0233] For example, by increasing an immune response, particularly increasing antigenic qualities of the hyperproliferative disorder or by proliferating, differentiating, or mobilizing T-cells; hyperproliferative disorders can be treated. This immune response may be increased by either enhancing an existing immune response, or by initiating a new immune response. Alternatively, decreasing an immune response may also be a method of treating hyperproliferative disorders, such as a chemotherapeutic agent.

[0234] Examples of hyperproliferative disorders that can be treated or detected by a polynucleotide or polypeptide of the present invention include, but are not limited to neoplasms located in the breast, lungs, colon and kidney. Similarly, other hyperproliferative disorders can also be treated or detected by a polynucleotide or polypeptide of the present invention.

[0235] Chemotaxis

[0236] A polynucleotide or polypeptide of the present invention may have chemotaxis activity. A chemotaxic molecule attracts or mobilizes cells (e.g. monocytes, fibroblasts, neutrophils, T-cells, mast cells, eosinophils, epithelial and/or endothelial cells) to a particular site in the body, such as inflammation, infection, or site of hyperproliferation. The mobilized cells can then fight off and/or heal the particular trauma or abnormality.

[0237] A polynucleotide or polypeptide of the present invention may increase chemotaxic activity of particular cells. These chemotactic molecules can then be used to treat inflammation, infection, hyperproliferative disorders, or any immune system disorder by increasing the number of cells targeted to a particular location in the body. For example, chemotaxic molecules can be used to treat wounds and other trauma to tissues by attracting immune cells to the injured location. Chemotactic molecules of the present invention can also attract fibroblasts, which can be used to treat wounds.

[0238] It is also contemplated that a polynucleotide or polypeptide of the present invention may inhibit chemotactic activity. These molecules could also be used to treat disorders. Thus, a polynucleotide or polypeptide of the present invention could be used as an inhibitor of chemotaxis.

[0239] Binding Activity

[0240] A polypeptide of the present invention may be used to screen for molecules that bind to the polypeptide or for molecules to which the polypeptide binds. The binding of the polypeptide and the molecule may activate (agonist), increase, inhibit (antagonist), or decrease activity of the polypeptide or the molecule bound. Examples of such molecules include antibodies, oligonucleotides, proteins (e.g. receptors), or small molecules.

[0241] Preferably, the molecule is closely related to the natural ligand of the polypeptide, e.g. a fragment of the ligand, or a natural substrate, a ligand, a structural or functional mimetic. (See, Coligan et al., Current Protocols in Immunology 1(2):Chapter 5 (1991).) Similarly, the molecule can be closely related to the natural receptor to which the polypeptide binds, or at least, a fragment of the receptor capable of being bound by the polypeptide (e.g. active site). In either case, the molecule can be rationally designed using known techniques.

[0242] Preferably, the screening for these molecules involves producing appropriate cells which express the polypeptide, either as a secreted protein or on the cell membrane. Preferred cells include cells from mammals, yeast, Drosophila, or E. coli. Cells expressing the polypeptide (or cell membrane containing the expressed polypeptide) are then preferably contacted with a test compound potentially containing the molecule to observe binding, stimulation, or inhibition of activity of either the polypeptide or the molecule.

[0243] The assay may simply test binding of a candidate compound to the polypeptide, wherein binding is detected by a label, or in an assay involving competition with a labeled competitor. Further, the assay may test whether the candidate compound results in a signal generated by binding to the polypeptide.

[0244] Alternatively, the assay can be carried out using cell-free preparations, polypeptide/molecule affixed to a solid support, chemical libraries, or natural product mixtures. The assay may also simply comprise the steps of mixing a candidate compound with a solution containing a polypeptide, measuring polypeptide/molecule activity or binding, and comparing the polypeptide/molecule activity or binding to a standard.

[0245] Preferably, an ELISA assay can measure polypeptide level or activity in a sample (e.g. biological sample) using a monoclonal or polyclonal antibody. The antibody can measure polypeptide level or activity by either binding, directly or indirectly, to the polypeptide or by competing with the polypeptide for a substrate.

[0246] All of these above assays can be used as diagnostic or prognostic markers. The molecules discovered using these assays can be used to treat disease or to bring about a particular result in a patient by activating or inhibiting the polypeptide/molecule. Moreover, the assays can discover agents which may inhibit or enhance the production of the polypeptide from suitably manipulated cells or tissues.

[0247] Therefore, the invention includes a method of identifying compounds which bind to a polypeptide of the invention comprising the steps of: (a) incubating a candidate binding compound with a polypeptide of the invention; and (b) determining if binding has occurred. Moreover, the invention includes a method of identifying agonists/antagonists comprising the steps of: (a) incubating a candidate compound with a polypeptide of the invention, (b) assaying a biological activity and (b) determining if a biological activity of the polypeptide has been altered.

[0248] The methods of the invention include using in a diagnostic or therapeutic context an isolated nucleic acid molecule comprising a nucleotide sequence which is at least 95% identical to a sequence of at least about 30 contiguous nucleotides in the nucleotide sequence sequencelD NO: of the file “14dec03.ST25.txt” (generated by PatentIn3.2) attached to this application and incorporated by reference.

[0249] The nucleic acid molecule used in the methods can include said sequence of contiguous nucleotides is included in the nucleotide sequence sequencelD NO: of the file “14dec03.ST25.txt” (generated by PatentIn3.2) attached to this application and incorporated by reference in the range of positions beginning with the nucleotide at about the position of the 5′ Nucleotide of the Sequence and ending with the nucleotide at about the position of the 3′ Nucleotide of the Sequence as defined for the file “14dec03.ST25.txt” (generated by PatentIn3.2) attached to this application and incorporated by reference.

[0250] Any nucleic acid molecule for the inventive methods can have a sequence of contiguous nucleotides is included in the nucleotide sequence sequence ID NO: of the file “14dec03.ST25.txt” (generated by PatentIn3.2) attached to this application and incorporated by reference in the range of positions beginning with the nucleotide at about the position of the 5′ Nucleotide of the Start Codon and ending with the nucleotide at about the position of the 3′ Nucleotide of the Sequence as defined for sequences in the file “14dec03.ST25.txt” (generated by PatentIn3.2) attached to this application and incorporated by reference.

[0251] A nucleic acid molecule can have a sequence of contiguous nucleotides included in the nucleotide sequence of sequencelD NO: of the file “14dec03.ST25.txt” (generated by PatentIn3.2) attached to this application and incorporated by reference in the range of positions beginning with the nucleotide at about the position of the 5′ Nucleotide of the First Amino Acid and ending with the nucleotide at about the position of the 3′ Nucleotide of the Sequence as defined for sequences in the file “14dec03.ST25.txt” (generated by PatentIn3.2) attached to this application and incorporated by reference.

[0252] An isolated nucleic acid molecule useful in the methods of the invention can comprise a nucleotide sequence which is at least 95% identical to a sequence of at least about 150 contiguous nucleotides in the nucleotide sequence of the file “14dec03.ST25.txt” (generated by PatentIn3.2) attached to this application and incorporated by reference.

[0253] Such an isolated nucleic acid molecule can comprise a nucleotide sequence which is at least 95% identical to a sequence of at least about 500 contiguous nucleotides in the nucleotide sequence of the file “14dec03.ST25.txt” (generated by PatentIn3.2) attached to this application and incorporated by reference.

[0254] A nucleic acid molecule in the methods can comprise a nucleotide sequence which is at least 95% identical to the nucleotide sequence of the file “14dec03.ST25.txt” (generated by PatentIn3.2) attached to this application and incorporated by reference beginning with the nucleotide at about the position of the 5′ Nucleotide of the First Amino Acid and ending with the nucleotide at about the position of the 3′ Nucleotide of the Sequence as defined for sequences in the file “14dec03.ST25.txt” (generated by PatentIn3.2) attached to this application and incorporated by reference.

[0255] Use of an isolated nucleic acid molecule comprising a nucleotide sequence which is at least 95% identical to the complete nucleotide sequence of the file “14dec03.ST25.txt” (generated by PatentIn3.2) attached to this application and incorporated by reference is also contemplated.

[0256] An isolated nucleic acid molecule which hybridizes under stringent hybridization conditions to a nucleic acid molecule, wherein said nucleic acid molecule which hybridizes does not hybridize under stringent hybridization conditions to a nucleic acid molecule having a nucleotide sequence consisting of only A residues or of only T residues, is likewise useful with the herein described methods.

[0257] An isolated nucleic acid molecule comprising a nucleotide sequence which is at least 95% identical to a sequence of at least 30 contiguous nucleotides in the nucleotide sequence of a human sequence identified in the file “14dec03.ST25.txt” (generated by PatentIn3.2) attached to this application and incorporated by reference, which DNA molecule is contemplated in the methods of the invention.

[0258] An isolated nucleic acid molecule for the inventive methods can also include wherein said sequence of at least 30 contiguous nucleotides is included in the nucleotide sequence of the complete open reading frame sequence

[0259] An isolated nucleic acid molecule for the inventive methods can also include comprising a nucleotide sequence which is at least 95% identical to sequence of at least 150 contiguous nucleotides in the nucleotide sequence

[0260] An isolated nucleic acid molecule for the inventive methods can also include comprising a nucleotide sequence which is at least 95% identical to sequence of at least 500 contiguous nucleotides in the nucleotide sequence encoded by said human cDNA clone.

[0261] An isolated nucleic acid molecule for the inventive methods can also include comprising a nucleotide sequence which is at least 95% identical to the complete nucleotide sequence encoded by said human cDNA clone.

[0262] Another inventive method includes a method for detecting in a biological sample a nucleic acid molecule comprising a nucleotide sequence which.is at least 95% identical to a sequence of at least 30 contiguous nucleotides in a sequence selected from the group consisting of: a nucleotide sequence of sequences defined in the file “14dec03.ST25.txt” (generated by PatentIn3.2) attached to this application and incorporated by reference; which method comprises a step of comparing a nucleotide sequence of at least one nucleic acid molecule in said sample with a sequence selected from said group and determining whether the sequence of said nucleic acid molecule in said sample is at least 95% identical to said selected sequence.

[0263] The above method can include a step of comparing sequences comprising determining the extent of nucleic acid hybridization between nucleic acid molecules in said sample and a nucleic acid molecule comprising said sequence selected from said group. Similarly, a step of comparing sequences is performed by comparing the nucleotide sequence determined from a nucleic acid molecule in said sample with said sequence selected from said group. The nucleic acid molecules can comprise DNA molecules or RNA molecules.

[0264] A method for identifying the species, tissue or cell type of a biological sample is also contemplated which method comprises a step of detecting nucleic acid molecules in said sample, if any, comprising a nucleotide sequence that is at least 95% identical to a sequence of at least 30 contiguous nucleotides in a sequence selected from the group consisting of: a nucleotide sequence in the file “14dec03.ST25.txt” (generated by PatentIn3.2) attached to this application and incorporated by reference.

[0265] The method for identifying the species, tissue or cell type of a biological sample can comprise a step of detecting nucleic acid molecules comprising a nucleotide sequence in a panel of at least two nucleotide sequences, wherein at least one sequence in said panel is at least 95% identical to a sequence of at least 30 contiguous nucleotides in a sequence selected from said group.

[0266] The invention includes a method for diagnosing in a subject a pathological condition associated with abnormal structure or expression of a gene encoding a secreted protein or membrane-bound protein translated from the sequences identified in the file “14dec03.ST25.txt” (generated by PatentIn3.2) attached to this application and incorporated by reference, which method comprises a step of detecting in a biological sample obtained from said subject nucleic acid molecules, if any, comprising a nucleotide sequence that is at least 95% identical to a sequence of at least 30 contiguous nucleotides in a sequence selected from the group consisting of: a nucleotide sequence of the file “14dec03.ST25.txt” (generated by PatentIn3.2) attached to this application and incorporated by reference.

[0267] The method for diagnosing a pathological condition (e.g. breast, lung, colon or kidney cancer) can comprise a step of detecting nucleic acid molecules comprising a nucleotide sequence in a panel of at least two nucleotide sequences, wherein at least one sequence in said panel is at least 95% identical to a sequence of at least 30 contiguous nucleotides in a sequence selected from said group.

[0268] In furtherance of the methods of the invention, an isolated antibody which binds specifically to a polypeptide comprising an amino acid sequence that is at least 90% identical to a sequence of at least 10 contiguous amino acids in a sequence selected from the group consisting of: an amino acid sequence translated from sequences defined in the file “14dec03.ST25.txt” (generated by PatentIn3.2) attached to this application and incorporated by reference is useful as a reagent in a diagnostic or therapeutic procedure.

[0269] The invention further contemplates a method for detecting in a biological sample a polypeptide comprising an amino acid sequence which is at least 90% identical to a sequence of at least 10 contiguous amino acids in a sequence selected from the group consisting of: an amino acid sequence of translated sequences defined in the file “14dec03.ST25.txt” (generated by PatentIn3.2) attached to this application and incorporated by reference which method comprises a step of comparing an amino acid sequence of at least one polypeptide molecule in said sample with a sequence selected from said group and determining whether the sequence of said polypeptide molecule in said sample is at least 90% identical to said sequence of at least 10 contiguous amino acids.

[0270] A method of the invention can include a method wherein said step of comparing an amino acid sequence of at least one polypeptide molecule in said sample with a sequence selected from said group comprises determining the extent of specific binding of polypeptides in said sample to an antibody which binds specifically to a polypeptide comprising an amino acid sequence that is at least 90% identical to a sequence of at least 10 contiguous amino acids in a sequence selected from the group consisting of: an amino acid sequence of translated from sequences as defined in the file “14dec03.ST25.txt” (generated by PatentIn3.2) attached to this application and incorporated by reference.

[0271] The method can include wherein said step of comparing sequences is performed by comparing the amino acid sequence determined from a polypeptide molecule in said sample with said sequence selected from said group.

[0272] A method for identifying the species, tissue or cell type of a biological sample which method comprises a step of detecting polypeptide molecules in said sample, if any, comprising an amino acid sequence that is at least 90% identical to a sequence of at least 10 contiguous amino acids in a sequence selected from the group consisting of: an amino acid sequence translated from sequences as defined in the file “14dec03.ST25.txt” (generated by PatentIn3.2) attached to this application and incorporated by reference is also contemplated.

[0273] Also preferred is the above method for identifying the species, tissue or cell type of a biological sample, which method comprises a step of detecting polypeptide molecules comprising an amino acid sequence in a panel of at least two amino acid sequences, wherein at least one sequence in said panel is at least 90% identical to a sequence of at least 10 contiguous, amino acids in a sequence selected from the above group.

[0274] Also preferred is a method for diagnosing in a subject a pathological condition associated with abnormal structure or expression of a gene encoding a secreted protein or membrane-bound protein identified in the file “14dec03.ST25.txt” (generated by PatentIn3.2) attached to this application and incorporated by reference, which method comprises a step of detecting in a biological sample obtained from said subject polypeptide molecules comprising an amino acid sequence in a panel of at least two amino acid sequences, wherein at least one sequence in said panel is at least 90% identical to a sequence of at least 10 contiguous amino acids in a sequence selected from the group consisting of: an amino acid sequence of translated from sequences as defined in the file “14dec03.ST25.txt” (generated by PatentIn3.2) attached to this application and incorporated by reference.

[0275] In any of these methods, the step of detecting said polypeptide molecules includes using an antibody.

[0276] Also preferred for use in the methods of the invention is an isolated nucleic acid molecule comprising a nucleotide sequence which is at least 95% identical to a nucleotide sequence encoding a polypeptide wherein said polypeptide comprises an amino acid sequence that is at least 90% identical to a sequence of at least 10 contiguous amino acids in a sequence selected from the group consisting of: an amino acid sequence of translated from sequences as defined in the file “14dec03.ST25.txt” (generated by PatentIn3.2) attached to this application and incorporated by reference.

[0277] Also preferred for use in the methods of the invention is an isolated nucleic acid molecule, wherein said nucleotide sequence encoding a polypeptide has been optimized for expression of said polypeptide in a prokaryotic host.

[0278] Also preferred for use in the methods of the invention is an isolated nucleic acid molecule, wherein said polypeptide comprises an amino acid sequence selected from the group consisting of: an amino acid sequence of translated from sequences as defined in the file “14dec03.ST25.txt” (generated by PatentIn3.2) attached to this application and incorporated by reference.

[0279] Further preferred is a method of making a recombinant vector comprising inserting any of the above isolated nucleic acid molecule into a vector. Also preferred is the recombinant vector produced by this method. Also preferred is a method of making a recombinant host cell comprising introducing the vector into a host cell, as well as the recombinant host cell produced by this method.

[0280] Also preferred is a method of making an isolated polypeptide comprising culturing this recombinant host cell under conditions such that said polypeptide is expressed and recovering said polypeptide. Also preferred is this method of making an isolated polypeptide, wherein said recombinant host cell is a eukaryotic cell and said polypeptide is a secreted portion of a human secreted protein comprising an amino acid sequence selected from the group consisting of: an amino acid sequence translated from sequences in the file “14dec03.ST25.txt” (generated by PatentIn3.2) attached to this application and incorporated by reference and said position of the First Amino Acid of the Secreted Portion translated from sequences is defined in the file “14dec03.ST25.txt” (generated by PatentIn3.2) attached to this application and incorporated by reference. The isolated polypeptide produced by this method is also preferred.

[0281] Having generally described the invention, the same will be more readily understood by reference to the following examples, which are provided by way of illustration and are not intended as limiting. 2. EXAMPLES

[0282] The following examples are put forth so as to provide those of ordinary skill in the art with a compete disclosure and description of how to make and use the present invention, and are not intended to limit the scope of what the inventors regard as their invention nor are they intended to represent that the experiments below are all and only experiments performed. Efforts have been made to ensure accuracy with respect to numbers used (e.g. amounts, temperature, etc.) but some experimental errors and deviations should be accounted for. Unless indicated otherwise, parts are parts of weight, molecular weight is weight average molecular weight, temperature is in degrees Celsius, and pressure is at or near atmospheric.

### Example 1

### Tissue Distribution of Polypeptide in Breast, Lung, Colon or Kidney Cancer Tissue

[0283] Tissue distribution of mRNA expression of polynucleotides of the present invention is determined using protocols for Northern blot analysis, described by, among others, Sambrook et al. For example, a cDNA probe produced by the method described in Example 1 is labeled with p³² using the rediprime.™ DNA labeling system (Amersham Life Science), according to manufacturer's instructions. After labeling, the probe is purified using CHROMA SPIN-100.™ column (Clontech Laboratories, Inc.), according to manufacturer's protocol number PT 1200-1. The purified labeled probe is then used to examine various human tissues for mRNA expression.

[0284] Multiple Tissue Northern (MTN) blots containing various human tissues (H) or human immune system tissues (IM) (Clontech) are examined with the labeled probe using ExpressHyb™ hybridization solution (Clontech) according to manufacturer's protocol number PT1190-1. Following hybridization and washing, the blots are mounted and exposed to film at −70° C. overnight, and the films developed according to standard procedures.

### Example 2

### Chromosomal Mapping of the Polynucleotides

[0285] An oligonucleotide primer set is designed according to the sequence at the 5′ end of the sequences in the file “14dec03.ST25.txt” (generated by PatentIn3.2) attached to this application and incorporated by reference. This primer preferably spans about 100 nucleotides. This primer set is then used in a polymerase chain reaction under the following set of conditions: 30 seconds, 95° C.; 1 minute, 56° C.; 1 minute, 70° C. This cycle is repeated 32 times followed by one 5 minute cycle at 70° C.

[0286] Human, mouse, and hamster DNA is used as template in addition to a somatic cell hybrid panel containing individual chromosomes or chromosome fragments (Bios, Inc). The reaction is analyzed on either 8% polyacrylamide gels or 3.5% agarose gels. Chromosome mapping is determined by the presence of an approximately 100 bp PCR fragment in the particular somatic cell hybrid.

### Example 3

### Expression of a Polypeptide in Mammalian Cells

[0287] The polypeptide for use in the methods of the present invention can be expressed in a mammalian cell. A typical mammalian expression vector contains a promoter element, which mediates the initiation of transcription of MRNA, a protein coding sequence, and signals required for the termination of transcription and polyadenylation of the transcript. Additional elements include enhancers, Kozak sequences and intervening sequences flanked by donor and acceptor sites for RNA splicing. Highly efficient transcription is achieved with the early and late promoters from SV40, the long terminal repeats (LTRs) from retroviruses, e.g. RSV, HTLVI, HIVI and the early promoter of the cytomegalovirus (CMV). However, cellular elements can also be used (e.g. the human actin promoter).

[0288] Suitable expression vectors for use in practicing the present invention include, for example, vectors such as pSVL and pMSG (Pharmacia, Uppsala, Sweden), pRSVcat (ATCC 37152), pSV2dhfr (ATCC 37146), pBC12MI (ATCC 67109), pCMVSport 2.0, and pCMVSport 3.0. Mammalian host cells that could be used include, human Hela, 293, H9 and Jurkat cells, mouse NIH3T3 and C127 cells, COS-1, COS-7 and CV1, quail QC1-3 cells, mouse L cells and Chinese hamster ovary (CHO) cells.

[0289] Alternatively, the polypeptide can be expressed in stable cell lines containing the polynucleotide integrated into a chromosome. The co-transfection with a selectable marker such as dhfr, gpt, neomycin, hygromycin allows the identification and isolation of the transfected cells.

[0290] The transfected gene can also be amplified to express large amounts of the encoded protein. The DHFR (dihydrofolate reductase) marker is useful in developing cell lines that carry several hundred or even several thousand copies of the gene of interest. (See, e.g. Alt, F. W., et al., J. Biol. Chem. 253:1357-1370 (1978); Hamlin, J. L. and Ma, C., Biochem. et Biophys. Acta, 1097:107-143 (1990); Page, M. J. and Sydenham, M. A., Biotechnology 9:64-68 (1991).) Another useful selection marker is the enzyme glutamine synthase (GS) (Murphy et al., Biochem J. 227:277-279 (1991); Bebbington et al., Bio/Technology 10:169-175 (1992). Using these markers, the mammalian cells are grown in selective medium and the cells with the highest resistance are selected. These cell lines contain the amplified gene(s) integrated into a chromosome. Chinese hamster ovary (CHO) and NSO cells are often used for the production of proteins.

[0291] Derivatives of the plasmid pSV2-dhfr (ATCC Accession No. 37146), the expression vectors pC4 (ATCC Accession No. 209646) and pC6 (ATCC Accession No.209647) contain the strong promoter (LTR) of the Rous Sarcoma Virus (Cullen et al., Molecular and Cellular Biology, 438-447 (March, 1985)) plus a fragment of the CMV-enhancer (Boshart et al., Cell 41:521-530 (1985).) Multiple cloning sites, e.g. with the restriction enzyme cleavage sites BamHl, Xbal and Asp718, facilitate the cloning of the gene of interest. The vectors also contain the 3′ intron, the polyadenylation and termination signal of the rat preproinsulin gene, and the mouse DHFR gene under control of the SV40 early promoter.

[0292] Specifically, the plasmid pC6, for example, is digested with appropriate restriction enzymes and then dephosphorylated using calf intestinal phosphates by procedures known in the art. The vector is then isolated from a 1% agarose gel.

[0293] A polynucleotide of the present invention is amplified according to the protocol outlined in Example 1. If the naturally occurring signal sequence is used to produce the secreted protein, the vector does not need a second signal peptide. Alternatively, if the naturally occurring signal sequence is not used, the vector can be modified to include a heterologous signal sequence. (See, e.g. WO 96/34891.)

[0294] The amplified fragment is isolated from a 1% agarose gel using a commercially available kit (“Geneclean,” BIO 101 Inc., La Jolla, Calif.). The fragment then is digested with appropriate restriction enzymes and again purified on a 1% agarose gel.

[0295] The amplified fragment is then digested with the same restriction enzyme and purified on a 1% agarose gel. The isolated fragment and the dephosphorylated vector are then ligated with T4 DNA ligase. E. coli HB 101 or XL-1 Blue cells are then transformed and bacteria are identified that contain the fragment inserted into plasmid pC6 using, for instance, restriction enzyme analysis.

[0296] Chinese hamster ovary cells lacking an active DHFR gene is used for transfection. Five micrograms (μg) of the expression plasmid pC6 is cotransfected with 0.5 μg of the plasmid pSVneo using lipofectin (Felgner et al., supra). The plasmid pSV2-neo contains a dominant selectable marker, the neo gene from Tn5 encoding an enzyme that confers resistance to a group of antibiotics including G418. The cells are seeded in alpha minus MEM supplemented with 1 mg/ml G418. After 2 days, the cells are trypsinized and seeded in hybridoma cloning plates (Greiner, Germany) in alpha minus MEM supplemented with 10, 25, or 50 ng/ml of metothrexate plus 1 mg/ml G418. After about 10-14 days single clones are trypsinized and then seeded in 6-well petri dishes or 10 ml flasks using different concentrations of methotrexate (50 nM, 100 nM, 200 nM, 400 nM, 800 nM). Clones growing at the highest concentrations of methotrexate are then transferred to new 6-well plates containing even higher concentrations of methotrexate (1 micromolar (μM), 2 μgM, 5 μM, 10 μM, 20 μM). The same procedure is repeated until clones are obtained which grow at a concentration of 100-200 μM. Expression of the desired gene product is analyzed, for instance, by SDS-PAGE and Western blot or by reversed phase HPLC analysis.

### Example 4

### Production of an Antibody from a Polypeptide

[0297] Antibodies for use in the methods of the present invention can be prepared by a variety of methods. (See, Current Protocols, Chapter 2.) For example, cells expressing a polypeptide of the present invention are administered to an animal to induce the production of sera containing polyclonal antibodies. In a preferred method, a preparation of the secreted or membrane-bound protein is prepared and purified to render it substantially free of natural contaminants. Such a preparation is then introduced into an animal in order to produce polyclonal antisera of greater specific activity.

[0298] In the most preferred method, the antibodies of the present invention are monoclonal antibodies (or protein binding fragments thereof). Such monoclonal antibodies can be prepared using hybridoma technology. (Kohler et al., Nature 256:495 (1975); Kohler et al., Eur. J. Immunol. 6:511 (1976); Kohler et al., Eur. J. lmmunol. 6:292 (1976); Hammerling et al., in: Monoclonal Antibodies and T-Cell Hybridomas, Elsevier, N.Y., pp. 563-681 (1981).) In general, such procedures involve immunizing an animal (preferably a mouse) with polypeptide or, more preferably, with a secreted polypeptide-expressing cell. Such cells may be cultured in any suitable tissue culture medium; however, it is preferable to culture cells in Earle's modified Eagle's medium supplemented with 10% fetal bovine serum (inactivated at about 56° C.), and supplemented with about 10 g/l of nonessential amino acids, about 1,000 U/ml of penicillin, and about 100 μg/ml of streptomycin.

[0299] The splenocytes of such mice are extracted and fused with a suitable myeloma cell line. Any suitable myeloma cell line may be employed in accordance with the present invention; however, it is preferable to employ the parent myeloma cell line (SP20), available from the ATCC. After fusion, the resulting hybridoma cells are selectively maintained in HAT medium, and then cloned by limiting dilution as described by Wands et al. (Gastroenterology 80:225-232 (1981).) The hybridoma cells obtained through such a selection are then assayed to identify clones which secrete antibodies capable of binding the polypeptide.

[0300] Alternatively, additional antibodies capable of binding to the polypeptide can be produced in a two-step procedure using anti-idiotypic antibodies. Such a method makes use of the fact that antibodies are themselves antigens, and therefore, it is possible to obtain an antibody which binds to a second antibody. In accordance with this method, protein specific antibodies are used to immunize an animal, preferably a mouse. The splenocytes of such an animal are then used to produce hybridoma cells, and the hybridoma cells are screened to identify clones which produce an antibody whose ability to bind to the protein-specific antibody can be blocked by the polypeptide. Such antibodies comprise anti-idiotypic antibodies to the protein-specific antibody and can be used to immunize an animal to induce formation of further protein-specific antibodies.

[0301] It will be appreciated that Fab and F(ab′)2 and other fragments of the antibodies of the present invention may be used according to the methods disclosed herein. Such fragments are typically produced by proteolytic cleavage, using enzymes such as papain (to produce Fab fragments) or pepsin (to produce F(ab′)2 fragments). Alternatively, secreted protein-binding fragments can be produced through the application of recombinant DNA technology or through synthetic chemistry.

[0302] For in vivo use of antibodies in humans, it may be preferable to use “humanized” chimeric monoclonal antibodies. Such antibodies can be produced using genetic constructs derived from hybridoma cells producing the monoclonal antibodies described above. Methods for producing chimeric antibodies are known in the art. (See, for review, Morrison, Science 229:1202 (1985); Oi et al., BioTechniques 4:214 (1986); Cabilly et al., U.S. Pat. No. 4,816,567; Taniguchi et al., EP 171496; Morrison et al., EP 173494; Neuberger et al., WO 8601533; Robinson et al., WO 8702671; Boulianne et al., Nature 312:643 (1984); Neuberger et al., Nature 314:268 (1985).)

### Example 5

### Method of Determining Alterations in a Gene Corresponding to a Polynucleotide

[0303] RNA isolated from entire families or individual patients presenting with a phenotype of interest (such as a disease) is be isolated. cDNA is then generated from these RNA samples using protocols known in the art. (See, Sambrook.) The cDNA is then used as a template for PCR, employing primers surrounding regions of interest in sequences in the file “14dec03.ST25.txt” (generated by PatentIn3.2) attached to this application and incorporated by reference. Suggested PCR conditions consist of 35 cycles at 95° C. for 30 seconds; 60-120 seconds at 70° C., using buffer solutions described in Sidransky, D., et al., Science 252:706 (1991).

[0304] PCR products are then sequenced using primers labeled at their 5′ end with T4 polynucleotide kinase, employing SequiTherm Polymerase. (Epicentre Technologies). The intron-exon borders of selected exons are also determined and genomic PCR products analyzed to confirm the results. PCR products harboring suspected mutations is then cloned and sequenced to validate the results of the direct sequencing.

[0305] PCR products is cloned into T-tailed vectors as described in Holton, T. A. and Graham, M. W., Nucleic Acids Research, 19:1156 (1991) and sequenced with T7 polymerase (United States Biochemical). Affected individuals are identified by mutations not present in unaffected individuals.

[0306] Genomic rearrangements are also observed as a method of determining alterations in a gene corresponding to a polynucleotide. Genomic clones isolated according to Example 2 are nick-translated with digoxigenindeoxy-uridine 5′-triphosphate (Boehringer Manheim), and FISH performed as described in Johnson, Cg. et al., Methods Cell Biol. 35:73-99 (1991). Hybridization with the labeled probe is carried out using a vast excess of human cot-1 DNA for specific hybridization to the corresponding genomic locus.

[0307] Chromosomes are counterstained with 4,6-diarnino-2-phenylidole and propidium iodide, producing a combination of C- and R-bands. Aligned images for precise mapping are obtained using a triple-band filter set (Chroma Technology, Brattleboro, Vt.) in combination with a cooled charge-coupled device camera (Photometrics, Tucson, Ariz.) and variable excitation wavelength filters. (Johnson, Cv. et al., Genet. Anal. Tech. Appl., 8:75 (1991).) Image collection, analysis and chromosomal fractional length measurements are performed using the ISee Graphical Program System. (Inovision Corporation, Durham, N.C.) Chromosome alterations of the genomic region hybridized by the probe are identified as insertions, deletions, and translocations. These alterations are used as a diagnostic marker for an associated disease.

### Example 6

### Detection of Levels of mRNA Expressed in Diseased Tissues Using Arrays

[0308] (Supplemental data supplied in the accompanying Excel spreadsheet show the results used to support this patent by identifying the differential expression associated with diseased verusus cancerous tissue.)

[0309] The identified sequences representing a variety of candidate genes to be screened for differential expression in cancer. 5′-modified oligonucleotides representing the novel sequences and optimized for DNA microarray analysis can be designed using a combination of GENSCAN, Pfam, Primer3 (release 0.9 (1998) MIT Whitehead Institute) and spotted onto reflective glass slides (Amersham) according to methods well known in the art. These microarrays can then be used to study differential gene expression in selected cell lines and patient tissues. Normal tissues and tissues from cancer patients were processed to generate T7 RNA polymerase transcribed polynucleotides, which were, in turn, assessed for expression in the microarrays.

[0310] The microarrays were then used to study differential gene expression in various disease samples and appropriate normal control samples. Target polynucleotides were prepared from total RNA, first reverse transcribed into codon using a primer containing a T7 RNA polymerase promoter, followed by second strand DNA synthesis. The codon was then transcribed in vitro to produce antisense RNA using the T7 promoter-mediated expression (see, e.g., Luo et al. (1999) Nature Med 5:117-122). In one embodiment, biotin labeled antisense RNA is generated from the RNA isolated from sample and control tissue by standard protocols and hybridized to the immobilized oligonucleotides representing the novel cancer genes.

[0311] Hybridization is detected by binding the biotinylated antibody with streptavidin which is in turn bound by a first anti-streptavidin antibody and the signals are amplified using a secondary antibody which binds the anti-streptavidin antibody and is conjugated to the fluorescent label Cy3. The fluorescent label is detected by commercially available array scanners. These indirect immunofluorescence techniques are known in the art.

[0312] The array images generated by hybridization were captured by a laser array scanner (e.g., GenePix 4000B by Axon Instruments, Foster City, Calif.) and the data was analyzed using DNA array image analysis software (ImaGene 4.0, Biodiscovery, Inc.) and an in-house microarray data analysis software (Mergen).

[0313] In one embodiment, the procedure provides for fluorescent labeling of RNA. Probes are labeled by making fluorescently labeled codon from the RNA starting material. Fluorescently labeled cDNAs prepared from the diseased RNA sample are compared to fluorescently labeled cDNAs prepared from normal cell RNA sample. For example, in one embodiment the codon probes from the normal cells are labeled with Cy3 fluorescent dye (green) and the codon probes prepared from the diseased cells are labeled with Cy5 fluorescent dye (red).

[0314] The differential expression assay can be performed by mixing equal amounts of probes from disease cells and normal cells of the same patient. The arrays were prehybridized by incubation for about 2 hrs at 60° C. in 5×SSC, 0.2% SDS, 1 mM EDTA, and then washed three times in water and twice in isopropanol. Following prehybridization of the array, the probe mixture was then hybridized to the array under conditions of high stringency (overnight at 42° C. in 50% formamide, 5×SSC, and 0.2% SDS). After hybridization, the array was washed at 55° C. three times as follows: (i) first wash in 1×SSC, 0.2% SDS; (ii) second wash in 0.1×SSC, 0.2% SDS; and (iii) third wash in 0.1×SSC.

[0315] The arrays were then scanned for green and/or red fluorescence, the images were processed using the AutoGene Microarray Image Analysis System™ (BioDiscovery, Inc., Los Angeles, Calif.) and the data from each scan set was normalized to produce the data in Tables 2 through 9.

### Results of Example 6

[0316] TABLE 2
Genes Over Expressed in Breast Tumors (part one)

| | Control | Cancer | Control | Cancer | Control | Cancer | Control | Cancer | Control | Cancer |
|---|---|---|---|---|---|---|---|---|---|---|
| | Patient 0005 | | Patient 01010416 | | Patient 01010417 | | Patient 01010421 | | Patient 01010425 | |
| Mergen ID | Control | Cancer | Control | Cancer | Control | Cancer | Control | Cancer | Control | Cancer |
| Clone-01 | 5770 | 4268 | 3141 | 14219 | 2923 | 6151 | 967 | 1777 | 2392 | 10520 |
| Clone-02 | 207 | 4311 | 1431 | 5814 | 1294 | 9171 | 181 | 1852 | 363 | 17012 |
| Clone-03 | 5353 | 20197 | 25654 | 64865 | 2185 | 41141 | 1346 | 930 | 7412 | 63341 |
| Clone-04 | 662 | 3432 | 649 | 4246 | 1083 | 8934 | 223 | 5917 | 939 | 6966 |
| Clone-06 | 182 | 581 | 292 | 1129 | 734 | 1613 | 95 | 1280 | 342 | 3073 |
| Clone-07 | 1558.5 | 6587.5 | 1630.1 | 7862.5 | 1155.6 | 4709.0 | 929.7 | 3721.1 | 2692.3 | 18362.3 |
| Clone-08 | 512.3 | 1713.6 | 550.1 | 495.3 | 523.6 | 1650.3 | 251.3 | 1952.8 | 678.3 | 2336.5 |
| Clone-09 | 91.1 | 557.1 | 131.4 | 1778.8 | 297.9 | 4212.9 | 103.4 | 6222.5 | 199.4 | 130.0 |
| Clone-10 | 170.7 | 2861.4 | 1737.9 | 7657.5 | 644.2 | 26411.9 | 111.4 | 29855.3 | 197.1 | 116.4 |
| Clone-11 | 145.8 | 412.6 | 213.1 | 839.3 | 50.6 | 4523.1 | 11.0 | 4537.4 | 31.0 | 11.0 |
| Clone-12 | 4300.7 | 21092.8 | 5972.5 | 19377.7 | 1350.6 | 8406.6 | 1269.9 | 10245.8 | 8879.7 | 27723.5 |
| Clone-15 | 340.0 | 1525.8 | 640.9 | 2494.4 | 368.3 | 758.7 | 137.6 | 768.7 | 900.6 | 4722.0 |
| Clone-16 | 638.8 | 4956.6 | 1926.9 | 1234.4 | 2062.7 | 7584.7 | 411.2 | 4341.9 | 1189.5 | 5918.7 |
| Clone-17 | 210.7 | 2391.7 | 558.6 | 7158.5 | 180.2 | 1727.0 | 122.1 | 365.9 | 1288.9 | 5158.1 |
| Clone-18 | 6578.1 | 34061.3 | 11788.7 | 40709.0 | 2568.4 | 9246.5 | 1580.0 | 7390.2 | 31575.8 | 38034.5 |
| Clone-19 | 283.2 | 2625.5 | 526.7 | 620.8 | 496.6 | 3265.8 | 176.9 | 4360.6 | 259.8 | 1054.6 |
| Clone-20 | 256.0 | 6112.7 | 363.0 | 142.3 | 533.2 | 5259.8 | 185.1 | 729.7 | 373.7 | 74.8 |
| Clone-21 | 779.0 | 3076.4 | 699.3 | 1234.8 | 682.3 | 1684.5 | 299.8 | 1042.3 | 638.5 | 4124.3 |
| Clone-22 | 818.8 | 10746.6 | 1080.1 | 4329.6 | 323.9 | 1143.0 | 191.0 | 724.9 | 3919.2 | 6118.3 |
| Clone-23 | 215.2 | 1695.6 | 764.8 | 774.5 | 377.7 | 846.5 | 171.4 | 989.6 | 467.3 | 2961.8 |
| Clone-24 | 253.4 | 822.7 | 157.8 | 1045.6 | 181.8 | 1041.3 | 88.9 | 358.8 | 273.1 | 3974.6 |
| Clone-25 | 1709.6 | 6666.2 | 2064.9 | 4322.8 | 2526.9 | 7727.1 | 517.6 | 28241.0 | 1230.5 | 29391.3 |
| Clone-26 | 419.2 | 1352.6 | 831.5 | 1876.9 | 200.3 | 2323.6 | 248.5 | 964.0 | 551.2 | 2745.1 |
| Clone-27 | 509.6 | 1121.8 | 663.5 | 2065.0 | 975.0 | 961.0 | 213.0 | 1188.8 | 542.0 | 2664.4 |

[0317] TABLE 3
Genes Over Expressed in Breast Tumors (part two)

| | Control | Cancer | Control | Cancer | Control | Cancer | Control | Cancer | Control | Cancer |
|---|---|---|---|---|---|---|---|---|---|---|
| | Patient 01010437 | | Patient 01010438 | | Patient 01010443 | | Patient P02003 | | Patient 01010427 | |
| Mergen ID | Control | Cancer | Control | Cancer | Control | Cancer | Control | Cancer | Control | Cancer |
| Clane-01 | 1181 | 5027 | 1207 | 5544 | 1520 | 3293 | 1656 | 6863 | | |
| Clone-02 | 398 | 3042 | 313 | 3718 | 1402 | 2580 | 550 | 909 | | |
| Clone-03 | 2782 | 1627 | 1872 | 6444 | 3779 | 28723 | 2531 | 22190 | | |
| Clone-04 | 728 | 4706 | 561 | 3906 | 1339 | 3900 | 347 | 1215 | | |
| Clone-06 | 234 | 644 | 391 | 1119 | 499 | 1442 | 121 | 337 | | |
| Clone-07 | 2154.6 | 17568.3 | 1880.9 | 8399.3 | 1446.5 | 9486.2 | 1263.3 | 1073.2 | 358.0 | 5949.0 |
| Clone-08 | 675.3 | 852.0 | 203.5 | 707.5 | 454.4 | 2802.4 | 410.9 | 633.8 | 208.8 | 1755.5 |
| Clane-09 | 89.7 | 1021.5 | 141.7 | 134.5 | 321.5 | 11233.0 | 145.5 | 1448.8 | 561.5 | 5794.0 |
| Clone-10 | 261.3 | 5229.9 | 115.2 | 174.6 | 427.4 | 44799.2 | 257.5 | 17014.2 | 361.6 | 38624.8 |
| Clone-11 | 73.8 | 643.3 | 15.7 | 26.8 | 103.5 | 12604.7 | 11.0 | 1765.4 | 26.3 | 1484.4 |
| Clone-12 | 3663.4 | 20477.8 | 862.3 | 9924.2 | 1901.1 | 6474.9 | 7059.4 | 12870.4 | 855.0 | 16149.9 |
| Clone-15 | 457.6 | 1914.4 | 287.0 | 1350.9 | 345.9 | 693.2 | 898.2 | 1094.3 | 200.1 | 660.9 |
| Clone-16 | 1298.3 | 1448.5 | 521.4 | 7112.5 | 476.2 | 707.7 | 973.4 | 9765.9 | 625.8 | 3800.7 |
| Clone-17 | 570.4 | 1798.1 | 207.0 | 748.7 | 219.2 | 995.2 | 465.8 | 9327.7 | 84.3 | 477.3 |
| Clone-18 | 10578.1 | 43845.9 | 1293.5 | 4978.1 | 2645.0 | 9846.2 | 16085.8 | 19792.9 | 1381.0 | 7508.4 |
| Clone-19 | 852.0 | 3590.2 | 235.3 | 1060.8 | 341.1 | 2422.6 | 467.2 | 2766.9 | 131.3 | 3780.7 |
| Clone-20 | 307.4 | 1537.0 | 231.3 | 2492.8 | 918.6 | 8903.8 | 484.6 | 5071.5 | 118.8 | 708.0 |
| Clone-21 | 990.4 | 6043.7 | 525.4 | 1744.2 | 402.3 | 1210.6 | 552.8 | 788.6 | 240.5 | 932.7 |
| Clone-22 | 1119.2 | 7032.0 | 363.7 | 4297.0 | 799.5 | 1113.9 | 4708.9 | 6186.2 | 161.7 | 1042.8 |
| Clone-23 | 415.9 | 2005.3 | 162.3 | 560.3 | 294.2 | 1220.2 | 205.7 | 1339.8 | 164.6 | 789.8 |
| Clone-24 | 285.7 | 933.2 | 170.1 | 1237.4 | 173.9 | 1204.3 | 120.6 | 251.3 | 34.1 | 322.0 |
| Clone-25 | 902.3 | 58795.4 | 859.8 | 4436.0 | 2479.4 | 15199.0 | 687.4 | 2386.4 | 289.8 | 30159.8 |
| Clone-26 | 377.2 | 1141.0 | 309.0 | 1033.1 | 325.3 | 1702.6 | 446.3 | 1002.4 | 265.8 | 1209.9 |
| Clone-27 | 616.8 | 2232.2 | 405.5 | 1494.5 | 714.1 | 3321.0 | 724.4 | 406.9 | 215.4 | 1045.7 |

[0318] TABLE 4
Genes Over Expressed in Colon Tumors (part one)

| | Control | Cancer | Control | Cancer | Control | Cancer | Control | Cancer | Control | Cancer |
|---|---|---|---|---|---|---|---|---|---|---|
| | Patient 01010023 | | Patient 01010126 | | Patient 01010150 | | Patient 01010169 | | Patient 01010078 | |
| Mergen ID | Control | Cancer | Control | Cancer | Control | Cancer | Control | Cancer | Control | Cancer |
| Clone-13 | 35.7 | 149.0 | 20.8 | 1378.2 | 14.9 | 192.0 | 13.0 | 1027.5 | 56.9 | 40.8 |
| Clone-14 | 15.0 | 43.5 | 32.5 | 163.4 | 23.8 | 261.2 | 1.1 | 103.0 | 37.5 | 416.7 |
| Clone-32 | 1528 | 14970 | 307 | 4303 | 864 | 4327 | 999 | 2376 | 380 | 2304 |
| Clone-33 | 5109 | 21561 | 1671 | 17031 | 1145 | 31962 | 2689 | 8080 | 2173 | 29803 |
| Clone-34 | 592 | 2156 | 341 | 1047 | 797 | 1721 | 247 | 3855 | 231 | 3260 |
| Clone-35 | 215 | 20194 | 676 | 8372 | 214 | 42265 | 87 | 4502 | 1479 | 11747 |
| Clone-36 | 993 | 4366 | 1618 | 12834 | 3958 | 9257 | 4013 | 14186 | 575 | 7026 |
| Clone-37 | 558 | 486 | 243 | 850 | 168 | 1284 | 159 | 1635 | 93 | 1146 |
| Clone-38 | 114 | 1425 | 79 | 185 | 311 | 608 | 168 | 154 | 35 | 627 |
| Clone-39 | 405 | 8634 | 247 | 15211 | 470 | 7174 | 1518 | 11661 | 881 | 11548 |
| Clone-40 | 153 | 1180 | 17 | 403 | 73 | 5218 | 91 | 941 | 184 | 965 |

[0319] TABLE 5
Genes Over Expressed in Colon Tumors (part two)

| | Control | Cancer | Control | Cancer | Control | Cancer | Control | Cancer | Control | Cancer |
|---|---|---|---|---|---|---|---|---|---|---|
| | Patient 01020191 | | Patient 1010191 | | Patient 1010402 | | Patient 1010413 | | Patient 1020025 | |
| Mergen ID | Control | Cancer | Control | Cancer | Control | Cancer | Control | Cancer | Control | Cancer |
| Clone-13 | 24.2 | 104.0 | 4 | 361 | 21 | 37 | 37 | 48 | | |
| Clone-14 | 17.0 | 189.1 | 8 | 413 | 1 | 39 | 10 | 450 | | |
| Clone-32 | 2360 | 8741 | 369 | 2810 | 515 | 2132 | 423 | 1228 | 766 | 9147 |
| Clone-33 | 2501 | 14886 | 3793 | 16131 | 5474 | 14254 | 1539 | 21185 | 4229 | 10946 |
| Clone-34 | 384 | 6983 | 1236 | 7031 | 563 | 11480 | 444 | 3715 | 262 | 1529 |
| Clone-35 | 113 | 16344 | 225 | 32480 | 115 | 2695 | 892 | 5215 | 526 | 3046 |
| Clone-36 | 1365 | 9727 | 6814 | 12528 | 3562 | 14063 | 841 | 5291 | 2137 | 7309 |
| Clone-37 | 331 | 3035 | 412 | 1189 | 605 | 2056 | 340 | 2463 | 173 | 1447 |
| Clone-38 | 42 | 521 | 52 | 1688 | 225 | 6132 | 96 | 448 | 90 | 329 |
| Clone-39 | 489 | 2776 | 719 | 5292 | 754 | 4812 | 512 | 1971 | 238 | 9650 |
| Clone-40 | 931 | 1702 | 69 | 1563 | 415 | 833 | 79 | 2755 | 72 | 536 |

[0320] TABLE 6
Genes Over Expressed in Lung Tumors (part one)

| | Control | Cancer | Control | Cancer | Control | Cancer | Control | Cancer | Control | Cancer |
|---|---|---|---|---|---|---|---|---|---|---|
| | Patient 01010123 | | Patient 01010400 | | Patient 01010411 | | Patient 01010424 | | Patient 01010429 | |
| Mergen ID | Control | Cancer | Control | Cancer | Control | Cancer | Control | Cancer | Control | Cancer |
| Clone-28 | 6804 | 21461 | 1561 | 3574 | 1570 | 6163 | 4524 | 13950 | 5395 | 12270 |
| Clone-29 | 7065.6 | 7285.9 | 161.3 | 3024.5 | 120.0 | 1101.2 | 691.8 | 9283.7 | 1201.5 | 7471.9 |
| Clone-30 | 1872.8 | 3357.1 | 177.4 | 1238.2 | 76.4 | 930.9 | 16.0 | 192.4 | 276.0 | 2905.9 |
| Clone-31 | 4356.7 | 4761.6 | 324.5 | 1485.9 | 110.4 | 1969.0 | 188.9 | 929.2 | 583.1 | 7791.4 |

[0321] TABLE 7
Genes Over Expressed in Lung Tumors (part two)

| | Control | Cancer | Control | Cancer | Control | Cancer | Control | Cancer | Control | Cancer |
|---|---|---|---|---|---|---|---|---|---|---|
| | Patient 01010432 | | Patient 01010433 | | Patient 01010435 | | Patient 01010448 | | Patient 01010449 | |
| Mergen ID | Control | Cancer | Control | Cancer | Control | Cancer | Control | Cancer | Control | Cancer |
| Clone-28 | 3158 | 8448 | 6897 | 22259 | 4304 | 19003 | 1599 | 7369 | 2227 | 10710 |
| Clone-29 | 14.4 | 78.8 | 291.6 | 2165.8 | 81.0 | 1071.4 | 6824.9 | 5906.2 | 1311.5 | 3229.2 |
| Clone-30 | 37.3 | 194.6 | 329.9 | 3080.0 | 18.5 | 79.0 | 1596.7 | 270.8 | 483.0 | 1621.4 |
| Clone-31 | 126.0 | 433.2 | 351.8 | 1293.8 | 73.7 | 820.2 | 1170.8 | 1963.1 | 837.4 | 1491.8 |

[0322] TABLE 8
Genes Over Expressed in Kidney Tumors (part one)

| | Control | Cancer | Control | Cancer | Control | Cancer | Control | Cancer | Control | Cancer |
|---|---|---|---|---|---|---|---|---|---|---|
| | Patient 01020012 | | Patient 01020026 | | Patient 01020027 | | Patient 01020029 | | Patient 01020068 | |
| Mergen ID | Control | Cancer | Control | Cancer | Control | Cancer | Control | Cancer | Control | Cancer |
| Clone-41 | 190 | 8608 | 153 | 1980 | 182 | 1388 | 404 | 2682 | 217 | 9741 |
| Clone-42 | 566 | 5497 | 141 | 1498 | 206 | 1158 | 529 | 7310 | 415 | 3486 |
| Clone-43 | 76 | 1131 | 133 | 306 | 63 | 2166 | 206 | 1511 | 228 | 852 |
| Clone-44 | 241 | 5963 | 74 | 522 | 59 | 2762 | 126 | 7584 | 283 | 30938 |
| Clone-45 | 2184.3 | 13265.3 | 358.7 | 2736.7 | 327.4 | 1863.3 | 955.2 | 9024.1 | 1546.0 | 12236.8 |
| Clone-46 | 962.5 | 4314.5 | 298.2 | 1189.9 | 258.3 | 1339.7 | 525.8 | 2699.9 | 527.7 | 1467.1 |
| Clone-47 | 1494.8 | 9989.7 | 444.7 | 3529.0 | 278.4 | 2961.6 | 1488.9 | 11933.3 | 575.6 | 14658.8 |
| Clone-48 | 1074.4 | 5027.8 | 78.8 | 376.7 | 20.3 | 93.8 | 183.9 | 767.9 | 375.9 | 2620.4 |
| Clone-49 | 4329.7 | 58342.6 | 1008.9 | 27846.2 | 1020.5 | 978.9 | 1944.5 | 21463.2 | 2351.5 | 58253.9 |
| Clone-50 | 624.6 | 7496.5 | 267.0 | 2181.3 | 107.1 | 333.3 | 176.4 | 3424.0 | 619.9 | 8192.7 |
| Clone-51 | 2886.0 | 13318.2 | 546.7 | 2293.5 | 533.5 | 2477.3 | 934.8 | 8117.2 | 1912.7 | 10248.6 |
| Clone-52 | 1653.5 | 18109.9 | 825.7 | 4450.8 | 420.2 | 5394.3 | 1037.7 | 4144.7 | 998.9 | 11124.7 |
| Clone-53 | 146.6 | 1756.8 | 54.8 | 300.2 | 1.0 | 139.8 | 71.5 | 656.4 | 121.1 | 3792.7 |
| Clone-54 | 1309.3 | 17059.0 | 335.1 | 9825.8 | 372.3 | 139.3 | 471.4 | 7796.5 | 631.3 | 2277.3 |
| Clone-55 | 567.5 | 3050.9 | 76.6 | 1806.3 | 79.9 | 677.4 | 136.0 | 3720.0 | 55.7 | 1022.3 |
| Clone-56 | 482.0 | 4271.5 | 76.6 | 724.3 | 64.7 | 276.0 | 129.0 | 3562.8 | 244.0 | 5032.7 |
| Clone-57 | 613.1 | 379.2 | 100.1 | 364.0 | 112.3 | 1508.4 | 86.2 | 2252.5 | 200.5 | 1793.5 |
| Clone-58 | 446.9 | 4121.2 | 202.4 | 1353.5 | 64.2 | 221.0 | 30.8 | 780.7 | 124.1 | 1067.2 |
| Clone-59 | 4321.5 | 24730.0 | 1739.9 | 11739.1 | 769.0 | 2955.3 | 996.0 | 11213.9 | 2447.8 | 11874.1 |
| Clone-60 | 356.4 | 432.6 | 89.6 | 1714.2 | 112.7 | 111.1 | 56.7 | 628.5 | 51.5 | 185.5 |
| Clone-61 | 1407.1 | 17515.1 | 315.0 | 1467.8 | 100.7 | 394.1 | 726.3 | 7347.3 | 1539.4 | 30451.0 |
| Clone-62 | 547.5 | 6738.7 | 169.0 | 1643.0 | 119.7 | 1034.8 | 339.4 | 5091.2 | 404.2 | 5864.2 |
| Clone-63 | 320.4 | 3242.9 | 100.7 | 709.0 | 28.6 | 234.9 | 143.5 | 2734.5 | 443.4 | 9977.3 |
| Clone-64 | 12765.0 | 26635.1 | 1299.3 | 8254.0 | 470.6 | 1816.7 | 1304.8 | 17388.5 | 5464.6 | 19511.4 |
| Clone-65 | 179.9 | 1707.2 | 62.5 | 603.9 | 14.0 | 114.6 | 22.9 | 1523.7 | 160.6 | 6267.0 |
| Clone-66 | 1762.1 | 6185.5 | 751.1 | 2320.5 | 342.4 | 2813.9 | 844.4 | 3093.0 | 1440.9 | 4955.6 |

[0323] TABLE 9
Genes Over Expressed in Kidney Tumors (part two)

| | Control | Cancer | Control | Cancer | Control | Cancer | Control | Cancer | Control | Cancer |
|---|---|---|---|---|---|---|---|---|---|---|
| | Patient 01020069 | | Patient 01020106 | | Patient 01020121 | | Patient 01020241 | | Patient lixingan | |
| Mergen ID | Control | Cancer | Control | Cancer | Control | Cancer | Control | Cancer | Control | Cancer |
| Clone-41 | 528 | 6679 | 260 | 14331 | 237 | 8022 | 702 | 151 | 261 | 1543 |
| Clone-42 | 223 | 5098 | 501 | 14400 | 334 | 2846 | 105 | 279 | 244 | 438 |
| Clone-43 | 187 | 1201 | 399 | 3168 | 187 | 1412 | 24 | 126 | 671 | 202 |
| Clone-44 | 220 | 4010 | 387 | 6217 | 183 | 860 | 1399 | 162 | 768 | 1617 |
| Clone-45 | 418.6 | 5399.1 | 2008.3 | 8243.5 | 478.0 | 954.4 | 7890.2 | 9330.8 | | |
| Clone-46 | 384.2 | 3116.1 | 1163.5 | 5273.1 | 217.8 | 277.1 | 2626.5 | 9171.3 | | |
| Clone-47 | 818.2 | 5428.8 | 1545.8 | 10334.6 | 231.5 | 409.2 | 3001.6 | 9650.0 | | |
| Clone-48 | 423.8 | 1860.9 | 327.3 | 1446.8 | 575.9 | 338.1 | 3932.2 | 2425.6 | | |
| Clone-49 | 2546.3 | 23516.9 | 4128.3 | 63021.8 | 5399.1 | 1353.8 | 8834.9 | 65536.0 | | |
| Clone-50 | 256.0 | 1988.2 | 644.6 | 5106.5 | 71.2 | 84.3 | 7998.6 | 3268.3 | | |
| Clone-51 | 1307.7 | 7167.6 | 3377.6 | 11467.2 | 357.5 | 580.1 | 6405.7 | 13204.1 | | |
| Clone-52 | 1334.6 | 5134.2 | 1289.6 | 17276.9 | 188.4 | 876.6 | 1259.7 | 3441.1 | | |
| Clone-53 | 85.9 | 1265.3 | 184.9 | 1603.4 | 50.0 | 92.0 | 2387.0 | 1826.3 | | |
| Clone-54 | 556.0 | 15473.1 | 1534.5 | 26849.8 | 328.3 | 763.2 | 2072.4 | 21004.6 | | |
| Clone-55 | 55.7 | 1180.3 | 397.0 | 1828.2 | 115.7 | 522.0 | 1256.2 | 1391.0 | | |
| Clone-56 | 77.4 | 2134.7 | 393.6 | 3266.6 | 105.1 | 124.3 | 1312.3 | 2408.6 | | |
| Clone-57 | 242.4 | 398.6 | 504.3 | 373.1 | 130.3 | 470.2 | 532.9 | 5001.8 | | |
| Clone-58 | 169.5 | 2464.4 | 350.2 | 4972.1 | 349.4 | 989.2 | 660.1 | 2679.2 | | |
| Clone-59 | 2688.7 | 11641.6 | 2662.5 | 14825.4 | 4031.7 | 3339.3 | 16184.3 | 22141.0 | | |
| Clone-60 | 1.0 | 597.5 | 472.0 | 1459.5 | 395.2 | 4242.0 | 1196.4 | 913.0 | | |
| Clane-61 | 629.4 | 12810.9 | 1467.2 | 8952.9 | 348.8 | 2730.7 | 8440.9 | 4639.6 | | |
| Clone-62 | 274.5 | 3650.4 | 965.2 | 9434.3 | 116.9 | 329.9 | 1975.1 | 2414.4 | | |
| Clone-63 | 347.3 | 2092.6 | 382.8 | 3251.3 | 57.6 | 185.2 | 2425.3 | 5155.8 | | |
| Clone-64 | 2153.4 | 13099.6 | 6553.0 | 44217.3 | 1098.0 | 2149.9 | 22649.6 | 15243.1 | | |
| Clone-65 | 93.3 | 666.4 | 223.8 | 1290.1 | 32.0 | 73.8 | 1761.3 | 1304.4 | | |
| Clone-66 | 1540.9 | 6624.9 | 2147.9 | 8871.6 | 4372.7 | 896.5 | 3421.4 | 12222.8 | | |

### Example 7

### Method of Detecting Abnormal Levels of a Polypeptide in a Biological Sample

[0324] A polypeptide of the present invention can be detected in a biological sample, and if an increased or decreased level of the polypeptide is detected, this polypeptide is a marker for a particular phenotype. Methods of detection are numerous, and thus, it is understood that one skilled in the art can modify the following assay to fit their particular needs.

[0325] For example, antibody-sandwich ELISAs are used to detect polypeptides in a sample, preferably a biological sample. Wells of a microtiter plate are coated with specific antibodies, at a final concentration of 0.2 to 10 μg/ml. The antibodies are either monoclonal or polyclonal. The wells are blocked so that non-specific binding of the polypeptide to the well is reduced.

[0326] The coated wells are then incubated for >2 hours at room temperature (RT) with a sample containing the polypeptide. Preferably, serial dilutions of the sample should be used to validate results. The plates are then washed three times with deionized or distilled water to remove unbounded polypeptide.

[0327] Next, 50 microliters (μl) of specific antibody-alkaline phosphatase conjugate, at a concentration of 25-400 nanogram. (ng), is added and incubated for 2 hours at room temperature. The plates are again washed three times with deionized or distilled water to remove unbounded conjugate.

[0328] Add 75 μl of 4-methylumbelliferyl phosphate (MUP) or p-nitrophenyl phosphate (NPP) substrate solution to each well and incubate 1 hour at room temperature. Measure the reaction by a microtiter plate reader. Prepare a standard curve, using serial dilutions of a control sample, and plot polypeptide concentration on the X-axis (log scale) and fluorescence or absorbance of the Y-axis (linear scale). Interpolate the concentration of the polypeptide in the sample using the standard curve.

### Example 8

### Method of Treating Increased Levels of the Polypeptide

[0329] Antisense technology is used to inhibit production of a polypeptide of the present invention. This technology is one example of a method of decreasing levels of a polypeptide, preferably a secreted or membrane-bound form, due to a variety of etiologies, such as cancer.

[0330] For example, a patient diagnosed with abnormally increased levels of a polypeptide is administered intravenously antisense polynucleotides at 0.5, 1.0, 1.5, 2.0 and 3.0 mg/kg day for 21 days. This treatment is repeated after a 7-day rest period if the treatment was well tolerated.

### Example 9

### Method of Treatment Using Gene Therapy

[0331] One method of gene therapy transplants fibroblasts, which are capable of expressing a polypeptide, onto a patient. Generally, fibroblasts are obtained from a subject by skin biopsy. The resulting tissue is placed in tissue-culture medium and separated into small pieces. Small chunks of the tissue are placed on a wet surface of a tissue culture flask, approximately ten pieces are placed in each flask. The flask is turned upside down, closed tight and left at room temperature over night. After 24 hours at room temperature, the flask is inverted and the chunks of tissue remain fixed to the bottom of the flask and fresh media (e.g. Ham's F12 media, with 10% FBS, penicillin and streptomycin) is added. The flasks are then incubated at 37° C. for approximately one week.

[0332] At this time, fresh media is added and subsequently changed every several days. After an additional two weeks in culture, a monolayer of fibroblasts emerge. The monolayer is trypsinized and scaled into larger flasks.

[0333] pMV-7 (Kirschmeier, P.T. et al., DNA, 7:219-25 (1988)), flanked by the long terminal repeats of the Moloney murine sarcoma virus, is digested with EcoRI and Hindlel and subsequently treated with calf intestinal phosphatase. The linear vector is fractionated on agarose gel and purified, using glass beads.

[0334] The cDNA encoding a polypeptide of the present invention can be amplified using PCR primers which correspond to the 5′ and 3′ end sequences respectively as set forth in Example 1. Preferably, the 5′ primer contains an EcoRI site and the 3′ primer includes a HindIII site. Equal quantities of the Moloney murine sarcoma virus linear backbone and the amplified EcoRi and HindIII fragment are added together, in the presence of T4 DNA ligase. The resulting mixture is maintained under conditions appropriate for ligation of the two fragments. The ligation mixture is then used to transform bacteria HB 101, which are then plated onto agar containing kanamycin for the purpose of confirming that the vector has the gene of interest properly inserted.

[0335] The amphotropic pA317 or GP+am12 packaging cells are grown in tissue culture to confluent density in Dulbecco's Modified Eagles Medium (DMEM) with 10% calf serum (CS), penicillin and streptomycin. The MSV vector containing the gene is then added to the media and the packaging cells transduced with the vector. The packaging cells now produce infectious viral particles containing the gene (the packaging cells are now referred to as producer cells).

[0336] Fresh media is added to the transduced producer cells, and subsequently, the media is harvested from a 10 cm² plate of confluent producer cells. The spent media, containing the infectious viral particles, is filtered through a millipore filter to remove detached producer cells and this media is then used to infect fibroblast cells. Media is removed from a sub-confluent plate of fibroblasts and quickly replaced with the media from the producer cells. This media is removed and replaced with fresh media. If the titer of virus is high, then virtually all fibroblasts will be infected and no selection is required. If the titer is very low, then it is necessary to use a retroviral vector that has a selectable marker, such as neo or his. Once the fibroblasts have been efficiently infected, the fibroblasts are analyzed to determine whether protein is produced.

[0337] The engineered fibroblasts are then transplanted onto the host, either alone or after having been grown to confluence on cytodex 3 microcarrier beads.

### Example 10

### Western Blots of Cell Lines to Understand their Characteristics as Relevant to Cancers

[0338] Western analysis was performed in a manner familiar to those experienced in the art but summarized below.

[0339] Rabbit IgG against the protein product of Clbne-49 (coding for Unigene#Hs.323477 and described as “solute carrier family 16 (monocarboxylic acid transporters), member 3; monocarboxylate transporter 3 [Homo sapiens]”) was used as the primary antibody. The secondary antibody, obtained from Pierce (Rockford, Ill. USA), was ImmunoPure® goat anti-rabbit IgG, Fc fragment specific and horseradish peroxidase conjugated.

[0340] Thirty cell lines were grown to confluency and collected into a lysis buffer. The lysate was centrifuged, the pellet (containing the membrane bound proteins) was collected and resuspened in “Protein Buffer” (50 mN Tris ph8.0, 150 mM NaCl, 10% Triton X10 and protease inhibitors).

[0341] Cell lysates were run through an SDS (Sodium Dodecyl Sulfate) PAGE (PolyAcrylamide Gel for Electrophoresis) gel (0.1% SDS, 10%PA, inTris buffer).

[0342] The gel's protein pattern was transferred to nitrocellulose paper to produce a Western blot. The blot was hybridized with the primary antibody, washed and then the secondary antibodies were applied. After washing, the horseradish peroxidase reaction was visualized using Amersham Biosciences' ECL™ Western Blotting Detection Reagents (catalogue #RPN2106), a chemiluminescence technique resulting from the HRP-catalyzed breakdown of luminol. The resulting light was detected by autoradiography.

[0343] Table 10 summarizes the results. Note that “+++” is a strong positive signal (indicating large amounts of the protein was present), “++” is a mildly positive signal (indicating some amounts of the protein was present but not as much as those indicated by “+++”), “+” represents a very small signal (at the lower limits of detection in this experiment) and “ND” means that no protein was detected (meaning there might be no protein but, more conservatively suggesting any protein was below our limits to detect it).

TABLE 10
Genes Over Expressed in Certain Cell Lines

| Cell Line # | Cell Line | Tissue of origin | Presence |
|---|---|---|---|
| 1 | 293 | Kidney, | +++ |
| | | adno trans | |
| 2 | A2780 | Ovarian | ND |
| 3 | A549 | Lung | ND |
| 4 | AT20 | Ovary | ND |
| 5 | C-33A | Cervical | ND |
| 6 | DLD1 | Colon | ND |
| 7 | DU145 | Prostate | +++ |
| 8 | EKVX | Lung | +++ |
| 9 | GM47 | Glioblastoma | ND |
| 10 | H28 | Lung-SCLC | ND |
| 11 | HCT-116 | Colon | ND |
| 12 | Hela | Cervx | ND |
| 13 | HEPG2 | Liver | +++ |
| 14 | HS578T | Breast | + |
| 15 | HT-29 | Colon | +++ |
| 16 | HTB-47 | kidney | +(+) |
| 17 | HUH-7 | Liver | ND |
| 18 | K562 | Bone marrow | ND |
| 19 | LnCAp | Prostate | +++ |
| 20 | LOX | Melaoma | ND |
| 21 | MCF-7 | Breast | +++ |
| 22 | MDA-231 | Breast | ND |
| 23 | MDA-MB231 | Breast | + |
| 24 | MDA-MB-435 | Breast | + |
| 25 | OVC1.1 | Ovarian | ND |
| 26 | OVC1.4 | Ovarian | ND |
| 27 | SJSA-1 | Bone | ND |
| 28 | SK-OV-3 | Ovarian | ND |
| 29 | U2-OS | Bone | ND |
| 30 | UC729-6 | Lymphocyte | ND |

### Example 11

### Immunohistochemical “Staining” to Establish Tumor Specificity

[0344] Immunohistochemical “staining” was performed in a manner familiar to those exeperienced in the art but summarized below.

[0345] Rabbit IgG against the protein product of Clone-49 (coding for Unigene#Hs.323477 and described as “solute carrier family 16 (monocarboxylic acid transporters), member 3; monocarboxylate transporter 3 [Homo sapiens]”) was used as the primary antibody. The secondary antibody and detection system used rabbit “ABC Staining System”, obtained from Santa Cruz Biotechnology, Inc (Sanat Cruz, Calif., USA), which uses a performed avidin-biotinylated horseradish peroxidase complex as the detection agent.

[0346] Human tumor and adjacent tissue (obtained during surgery) were. fixed in 4% neutral buffer formalin 12-14 hours (according to the size of the tissue) then dehydrated and embodedded in paraffin. The tissue embedded paraffin block was sliced by microtone into sections micron (4μ) thick, adhered onto standard glass slides and stained with hematoxylin and eosin (H&E) for diagnosis and to determine the best orientation of the block that would give optimal positioning for subsequent slices to produce the material used for the immunohistochemistry (explain below).

[0347] Serial 5 micron (5μ) sections cut from the block, adhered onto standard glass slides, then passed through a series of solutions of increasing ethanol concentration (the final concentration being 100% ethanol) to remove the paraffin and dehydrate the specimen(s).

[0348] Each slides was covered with a solution containing the primary antibody (in an appropriate buffer) and incubated at 4° C. overnight. The following day the slides were washed three times in PBS (phosphate buffered saline) and a solution containing the secondary antibody (in an appropriate buffer) was applied and allowed to incubate at 37° C. for 40 minutes. After washing, the slides were incubated in DAB chromogen (3,3′ Diaminobenzidine) as recommended by the supplier (Vector Laboratories, Burlingame, Calif., USA) to produce brown precipitate at the location of the antibody complex

[0349] FIG. 1 shows images of the immunohistochemical stained tissues showing greatly increased presence of the Clone49 protein in the (cell memebrane) of the tumor compared to the lower expression seen in the adjacent but health tissue.

### Example 12

### Over Expression of Genes in Mammalian Cells

[0350] Several clones were over expressed in COS-7 cells using the following method. Individual clones (DNA sequences) were ligated into the expression vector pCMV6-XL5 (from Origene Technologies Inc, Rockville, Md.). Each construct (clone- pCMV6-XL5) was mixed with FuGENE 6 (from Roche Catalogue#181443) as directed by the manufacturer (Roche) and incubated at room temperature for 30 minutes. Each construct-FuGENE 6 mixture was then use to transform COS-7 cells (in culture plates containing 5 mls of RPMI medium with no serum. These were then placed in a 5% CO₂ incubator at 37° C. for 8 hours after which the medium was changed to DMEM with 10% fetal calf serum and incubated for another 48 hours.

### Example 13

### Production of Monoclonal Antibodies to Gene Product

[0351] Monoclonal antibodies were made to the gene products of several of the clones using cells carrying the transgene (described in Example 12) using the method of subtractive immunization described below. Practitioners are particularly directed to Rao A. G. and Sleister H. M “Subtractive immunization: a tool for the generation of discriminatory antibodies to proteins of similar sequence” JOURNAL OF IMMUNOLOGICAL METHODS, 261 (2002) 213-220. It is to be understood that this invention is not limited to the particular methodology, protocols, and reagents described, as these may vary.

[0352] Briefly, cyclophosphamide-induced immunosuppression of several 5-6 week old BALB/c mice inoculated with the non-transgenic COS-7 cells was followed by immunization with COS-7 cells expressing the transprotein (carrying the gene to one of the clones). Tolerization was achieved by subcutaneous (s.q.) injections consisting of COS-7 cells (2×10⁶ cells in 0.3 millileters of sterile PBS) followed by peritoneum (i.p.) injections of cyclophosphamide (Sigma catalog#C7397 100 mg per kg mouse in a volume of 100 microliters) 24 and 48 hours later. This tolerization cycle was repeated two weeks later. After a further two weeks (at the end of the tolerization stage after the final cyclophosphamide treatment) tail blood was collected for subsequent analysis. One week later the mice were injected (i.p.) with COS-7 cells carrying the transgene (2×10⁶ cells in 0.3 millileters of sterile PBS) produced by the methods described above in Example 12. This immunization cycle was repeated three weeks later. After a further three weeks (at the end of the immunization stage—after the final transgenic COS-7 treatment) tail blood was collected for subsequent analysis. The pairs of tail blood sera (post tolerization and post immunization) were evaluated by ELISA to determine reactivity to non-transgenic COS-7 and transgenic COS-7 cells. This data were used to choose the mouse with the greatest differential reactivity (to the transgenic COS-7 cells veruses the non-transgenic COS-7 cells) for production of monoclonal antibodies (Mabs) using techniques that are well known to those experienced in the art.

[0353] It will be clear that the invention may be practiced otherwise than as particularly described in the foregoing description and examples. Numerous modifications and variations of the present invention are possible in light of the above teachings and, therefore, are within the scope of the appended claims.

[0354] The entire disclosure of each document cited (including patents, patent applications, journal articles, abstracts, laboratory manuals, books, or other disclosures) in the Background of the Invention, Detailed Description, and Examples is hereby incorporated herein by reference. Further, the sequence listing submitted herewith and the corresponding computer readable form are both incorporated herein by reference in their entireties.

[0355] All publications, patents and patent applications mentioned in this specification are herein expressly incorporated by reference in their entirety to the same extent as if each individual publication, patent or patent application was specifically and individually indicated to be incorporated by reference in its entirety.

[0356] The foregoing description of preferred embodiments of the invention has been presented by way of illustration and example for purposes of clarity and understanding. It is not intended to be exhaustive or to limit the invention to the precise forms disclosed. It will be readily apparent to those skilled in the art in light of the teachings of this invention that many changes and modification may be made thereto without departing from the spirit of the invention. It is intended that the scope of the invention be defined by the appended claims and their equivalents.

We claim:

1. A method of breast cancer diagnosis comprising detecting over expression of a gene of a protein found in breast tissue selected from the group consisting of ATP transporter protein, GPCR (G-protein coupled receptor), GPCR (G-protein coupled receptor) 14, hypothetical protein (breast), unc-93, bone marrow stromal cell antigen 2, cadherin EGF LAG seven-pass G-type receptor 1 flamingo (Drosophila) homolog, carcinoembryonic antigen-related cell adhesion molecule 3, carcinoembryonic antigen-related cell adhesion molecule 6, carcinoembryonic antigen-related cell adhesion molecule 8, claudin 7, cleft lip and palate associated membrane transmembrane protein 1, fibroblast growth factor receptor 3, heme oxygenase (decycling) 1, immediate early response 3, mucin 1 transmembrane, NG22, phosphatidylinositol glycan (class Q), similar to CGI-78 protein, clone MGC:4880 IMAGE:3457593, solute carrier family 1 (member 4), solute carrier family 6 (member 8), tetraspan 1, transporter 1 ATP-binding cassette sub-family B (MDR/TAP) and Type I transmembrane receptor (seizure-related protein).

2. A method as in claim 1, wherein the gene comprises a sequence selected from the group consisting of SEQ ID Nos 1-154 in the file “14dec03.ST25.txt” (generated by PatentIn3.2) attached to this application and incorporated by reference.

3. A method as in claim 1, wherein detecting over expression comprises a method selected from the group consisting of detecting a level of mRNA expression, detecting a level of protein expression, and probing for a polypeptide encoded by the gene.

4. A method as in claim 3, wherein the over expressed protein comprises an amino acid sequence encoded by a gene selected from the group of genes having nucleic acid sequences of SEQ ID Nos 1-154 in the file “14dec03.ST25.txt” (generated by PatentIn3.2) attached to this application and incorporated by reference.

5. A method of breast cancer treatment comprising blocking over expression of a gene encoding a secreted or membrane-bound protein found in breast tissue selected from the group consisting of SEQ ID Nos 1-154 in the file “14dec03.ST25.txt” (generated by PatentIn3.2) attached to this application and incorporated by reference.

6. A method of treatment as in claim 5, wherein the gene comprises a sequence selected from the group consisting of SEQ ID Nos 1-154 in the file “14dec03.ST25.txt” (generated by PatentIn3.2) attached to this application and incorporated by reference.

7. A method as in claim 5, wherein the method of treatment comprises a method selected from the group consisting of blocking expression of an mRNA encoded by the gene, blocking translation of the mRNA encoded by the gene, blocking expression of a protein encoded by the gene, blocking the function of the expressed protein, promoting the degradation of the expressed protein and using the protein as a tag to deliver treatment.

8. A method as in claim 7, wherein the method of treatment comprises blocking an mRNA, polypeptide or protein comprising a nucleotide or amino acid sequence encoded by a gene selected from the group of genes having nucleic acid sequences of SEQ ID Nos 1-154 in the file “14dec03.ST25.txt” (generated by PatentIn3.2) attached to this application and incorporated by reference.

9. A method as in claim 1, wherein the over expressed protein is secreted.

10. A method as in claim 1, wherein the over expressed protein is membrane-bound.

11. A method of lung cancer diagnosis comprising detecting over expression of a gene of a protein found in lung tissue selected from the group consisting of over expressed in lung of hypothetical protein, amino acid transporter 2, carboxypeptidase M, and putative G-protein coupled receptor.

12. A method as in claim 11, wherein the gene comprises a sequence selected from the group consisting of SEQ ID Nos 155-184 in the file “14dec03.ST25.txt” (generated by PatentIn3.2) attached to this application and incorporated by reference.

13. A method as in claim 11, wherein detecting over expression comprises a method selected from the group consisting of detecting a level of mRNA expression, detecting a level of protein expression, and probing for a polypeptide encoded by the gene.

14. A method as in claim 13, wherein the over expressed protein comprises an amino acid sequence encoded by a gene selected from the group of genes having nucleic acid sequences of SEQ ID Nos 155-184 in the file “14dec03.ST25.txt” (generated by PatentIn3.2) attached to this application and incorporated by reference.

15. A method of lung cancer treatment comprising blocking over expression of a gene encoding a secreted or membrane-bound protein found in lung tissue selected from the group consisting of SEQ ID Nos 155-184 in the file “14dec03.ST25.txt” (generated by PatentIn3.2) attached to this application and incorporated by reference.

16. A method of treatment as in claim 15, wherein the gene comprises a sequence selected from the group consisting of SEQ ID Nos 155-184 in the file “14dec03.ST25.txt” (generated by PatentIn3.2) attached to this application and incorporated by reference.

17. A method as in claim 15, wherein the method of treatment comprises a method selected from the group consisting of blocking expression of an mRNA encoded by the gene, blocking translation of the mRNA encoded by the gene, and blocking expression of a protein encoded by the gene, blocking the function of the expressed protein, promoting the degradation of the expressed protein and using the protein as a tag to deliver treatment.

18. A method as in claim 17, wherein the method of treatment comprises blocking an mRNA, polypeptide or protein comprising a nucleotide or amino acid sequence encoded by a gene selected from the group of genes having nucleic acid sequences of SEQ ID Nos 155-184 in the file “14dec03.ST25.txt” (generated by PatentIn3.2) attached to this application and incorporated by reference.

19. A method as in claim 11, wherein the over expressed protein is secreted.

20. A method as in claim 11, wherein the over expressed protein is membrane-bound.

21. A method of colon cancer diagnosis comprising detecting over expression of a gene of a protein found in colon tissue selected from the group consisting of hypothetical protein (colon), cadherin, formyl peptide receptor 1, AE-binding protein 1, solute carrier family 21 (organic anion transporter) member 12, secreted phosphoprotein 1 (osteopontin, bone sialoprotein I), Type I transmembrane protein Fn14, hypoxia-inducible protein 2, alpha-2-glycoprotein 1 zinc, chitinase 3-like1 (cartilage glycoprotein-39) and triggering receptor expressed on myeloid cells 2.

22. A method as in claim 21, wherein the gene comprises a sequence selected from the group consisting of SEQ ID Nos 185-246 in the file “14dec03.ST25.txt” (generated by PatentIn3.2) attached to this application and incorporated by reference.

23. A method as in claim 21, wherein detecting over expression comprises a method selected from the group consisting of detecting a level of mRNA expression, detecting a level of protein expression, and probing for a polypeptide encoded by the gene.

24. A method as in claim 23, wherein the over expressed protein comprises an amino acid sequence encoded by a gene selected from the group of genes having nucleic acid sequences of SEQ ID Nos 185-246 in the file “14dec03.ST25.txt” (generated by PatentIn3.2) attached to this application and incorporated by reference.

25. A method of colon cancer treatment comprising blocking over expression of a gene encoding a secreted or membrane-bound protein found in colon tissue selected from the group consisting of SEQ ID Nos 185-246 in the file “14dec03.ST25.txt” (generated by PatentIn3.2) attached to this application and incorporated by reference.

26. A method of treatment as in claim 25, wherein the gene comprises a sequence selected from the group consisting of SEQ ID Nos 185-246 in the file “14dec03.ST25.txt” (generated by PatentIn3.2) attached to this application and incorporated by reference.

27. A method as in claim 25, wherein the method of treatment comprises a method selected from the group consisting of blocking expression of an mRNA encoded by the gene, blocking translation of the mRNA encoded by the gene, and blocking expression of a protein encoded by the gene, blocking the function of the expressed protein, promoting the degradation of the expressed protein and using the protein as a tag to deliver treatment.

28. A method as in claim 27, wherein the method of treatment comprises blocking an mRNA, polypeptide or protein comprising a nucleotide or amino acid sequence encoded by a gene selected from the group of genes having nucleic acid sequences of SEQ ID Nos 185-246 in the file “14dec03.ST25.txt” (generated by PatentIn3.2) attached to this application and incorporated by reference.

29. A method as in claim 21, wherein the over expressed protein is secreted.

30. A method as in claim 21, wherein the over expressed protein is membrane-bound.

31. A method of kidney cancer diagnosis comprising detecting over expression of a gene of a protein found in kidney tissue selected from the group consisting of scavenger receptor class B, adenosine receptor A3, CD97 antigen, APO E-C2 gene, basement membrane-induced gene, integrin alpha 5 (fibronectin receptor, alpha polypeptide), peptide transporter 3, hypothetical protein FLJ22341, solute carrier family 16 (monocarboxylic acid transporters), interleukin 10 receptor alpha, FXYD domain-containing ion transport regulator 5, retinoic acid receptor responder (tazarotene induced) 2, integrin alpha X (antigen CD11C (p150), alpha polypeptide), sema domain seven thrombospondin repeats (type 1 and type 1-like) transmembrane domain (TM) and short cytoplasmic domain (semaphorin) 5B, guanylate binding protein 1 interferon-inducible 67 kD, leukocyte immunoglobulin-like receptor subfamily B, discoidin domain receptor family member 2, caveolin 1 caveolae protein 22 kD, chloride intracellular channel 1, CD36 antigen (collagen type I receptor, thrombospondin recep), small inducible cytokine A4 (homologous to mouse Mip-1b), lysosomal-associated multispanning membrane protein-5, integrin beta 2 antigen CD18 (p95) lymphocyte funtion-assoc, chemokine (C-X-C motif) receptor 4 (fusin), CD2 antigen (p50) sheep red blood cell receptor and epithelial membrane protein 3.

32. A method as in claim 31, wherein the gene comprises a sequence selected from the group consisting of SEQ ID Nos 247-385 in the file “14dec03.ST25.txt” (generated by PatentIn3.2) attached to this application and incorporated by reference.

33. A method as in claim 31, wherein detecting over expression comprises a method selected from the group consisting of detecting a level of mRNA expression, detecting a level of protein expression, and probing for a polypeptide encoded by the gene.

34. A method as in claim 33, wherein the over expressed protein comprises an amino acid sequence encoded by a gene selected from the group of genes having nucleic acid sequences of SEQ ID Nos 247-385 in the file “14dec03.ST25.txt” (generated by PatentIn3.2) attached to this application and incorporated by reference.

35. A method of kidney cancer treatment comprising blocking over expression of a gene encoding a secreted or membrane-bound protein found in kidney tissue selected from the group consisting of SEQ ID Nos 247-385 in the file “14dec03.ST25.txt” (generated by PatentIn3.2) attached to this application and incorporated by reference.

36. A method of treatment as in claim 35, wherein the gene comprises a sequence selected from the group consisting of SEQ ID Nos 247-385 in the file “14dec03.ST25.txt” (generated by PatentIn3.2) attached to this application and incorporated by reference.

37. A method as in claim 35, wherein the method of treatment comprises a method selected from the group consisting of blocking expression of an mRNA encoded by the gene, blocking translation of the mRNA encoded by the gene, blocking expression of a protein encoded by the gene, blocking the function of the expressed protein, promoting the degradation of the expressed protein and using the protein as a tag to deliver treatment.

38. A method as in claim 37, wherein the method of treatment comprises blocking an mRNA, polypeptide or protein comprising a nucleotide or amino acid sequence encoded by a gene selected from the group of genes having nucleic acid sequences of SEQ ID Nos 247-385 in the file “14dec03.ST25.txt” (generated by PatentIn3.2) attached to this application and incorporated by reference.

39. A method as in claim 31, wherein the over expressed protein is secreted.

40. A method as in claim 31, wherein the over expressed protein is membrane-bound.

41. An antibody or binding portion of an antibody that specifically binds a protein found in breast tissue, wherein the protein is selected from the group consisting of ATP transporter protein, GPCR (G-protein coupled receptor), GPCR (G-protein coupled receptor) 14, hypothetical protein (breast), unc-93, bone marrow stromal cell antigen 2, cadherin EGF LAG seven-pass G-type receptor 1 flamingo (Drosophila) homolog, carcinoembryonic antigen-related cell adhesion molecule 3, carcinoembryonic antigen-related cell adhesion molecule 6, carcinoembryonic antigen-related cell adhesion molecule 8, claudin 7, cleft lip and palate associated membrane transmembrane protein 1, fibroblast growth factor receptor 3, heme oxygenase (decycling) 1, immediate early response 3, mucin 1 transmembrane, NG22, phosphatidylinositol glycan (class Q), similar to CGI-78 protein, clone MGC:4880 IMAGE:3457593, solute carrier family 1 (member 4), solute carrier family 6 (member 8), tetraspan 1, transporter 1 ATP-binding cassette sub-family B (MDR/TAP) and Type I transmembrane receptor (seizure-related protein).

42. A method of breast cancer diagnosis or prognosis comprising contacting an antibody or binding portion of an antibody of claim 41, with the over expressed protein for which the antibody or binding portion thereof is specific.

43. A method of breast cancer treatment comprising blocking an over expressed protein selected from the group consisting of ATP transporter protein, GPCR (G-protein coupled receptor), GPCR (G-protein coupled receptor) 14, hypothetical protein (breast), unc-93, bone marrow stromal cell antigen 2, cadherin EGF LAG seven-pass G-type receptor 1 flamingo (Drosophila) homolog, carcinoembryonic antigen-related cell adhesion molecule 3, carcinoembryonic antigen-related cell adhesion molecule 6, carcinoembryonic antigen-related cell adhesion molecule 8, claudin 7, cleft lip and palate associated membrane transmembrane protein 1, fibroblast growth factor receptor 3, heme oxygenase (decycling) 1, immediate early response 3, mucin 1 transmembrane, NG22, phosphatidylinositol glycan (class Q), similar to CGI-78 protein, clone MGC:4880 IMAGE:3457593, solute carrier family 1 (member 4), solute carrier family 6 (member 8), tetraspan 1, transporter 1 ATP-binding cassette sub-family B (MDR/TAP) and Type I transmembrane receptor (seizure-related protein), with an antibody or binding portion thereof specific for said protein.

44. An antibody or binding portion of an antibody that specifically binds a protein found in lung tissue, wherein the protein is selected from the group consisting of over expressed in lung of hypothetical protein, amino acid transporter 2, carboxypeptidase M, and putative G-protein coupled receptor.

45. A method of lung cancer diagnosis or prognosis comprising contacting an antibody or binding portion of an antibody of claim 44, with the over expressed protein for which the antibody or binding portion thereof is specific.

46. A method of lung cancer treatment comprising blocking an over expressed protein selected from the group consisting of over expressed in lung of hypothetical protein, amino acid transporter 2, carboxypeptidase M, and putative G-protein coupled receptor, with an antibody or binding portion thereof specific for said protein.

47. An antibody or binding portion of an antibody that specifically binds to a protein found in colon tissue, wherein the protein is selected from the group consisting of hypothetical protein (colon), cadherin, formyl peptide receptor 1, AE-binding protein 1, solute carrier family 21 (organic anion transporter) member 12, secreted phosphoprotein 1 (osteopontin, bone sialoprotein I), Type I transmembrane protein Fn14, hypoxia-inducible protein 2, alpha-2-glycoprotein 1 zinc, chitinase 3-like1 (cartilage glycoprotein-39) and triggering receptor expressed on myeloid cells 2.

48. A method of colon cancer diagnosis or prognosis comprising contacting an antibody or binding portion of an antibody of claim 47, with the over expressed protein for which the antibody or binding portion thereof is specific.

49. A method of colon cancer treatment comprising blocking an over expressed protein selected from the group consisting of hypothetical protein (colon), cadherin, formyl peptide receptor 1, AE-binding protein 1, solute carrier family 21 (organic anion transporter) member 12, secreted phosphoprotein 1 (osteopontin, bone sialoprotein I), Type I transmembrane protein Fn14, hypoxia-inducible protein 2, alpha-2-glycoprotein 1 zinc, chitinase 3-like1 (cartilage glycoprotein-39) and triggering receptor expressed on myeloid cells 2.

50. An antibody or binding portion of an antibody that specifically binds to a protein found in kidney tissue, wherein the protein is selected from the group consisting of scavenger receptor class B, adenosine receptor A3, CD97 antigen, APO E-C2 gene, basement membrane-induced gene, integrin alpha 5 (fibronectin receptor, alpha polypeptide), peptide transporter 3, hypothetical protein FLJ22341, solute carrier family 16 (monocarboxylic acid transporters), interleukin 10 receptor alpha, FXYD domain-containing ion transport regulator 5, retinoic acid receptor responder (tazarotene induced) 2, integrin alpha X (antigen CD11C (p150), alpha polypeptide), sema domain seven thrombospondin repeats (type 1 and type 1-like) transmembrane domain (TM) and short cytoplasmic domain (semaphorin) 5B, guanylate binding protein 1 interferon-inducible 67 kD, leukocyte immunoglobulin-like receptor subfamily B, discoidin domain receptor family member 2, caveolin 1 caveolae protein 22 kD, chloride intracellular channel 1, CD36 antigen (collagen type I receptor, thrombospondin recep), small inducible cytokine A4 (homologous to mouse Mip-1b), lysosomal-associated multispanning membrane protein-5, integrin beta 2 antigen CD18 (p95) lymphocyte funtion-assoc, chemokine (C-X-C motif) receptor 4 (fusin), CD2 antigen (p50) sheep red blood cell receptor and epithelial membrane protein 3.

51. A method of kidney cancer diagnosis or prognosis comprising contacting an antibody or binding portion of an antibody of claim 50, with the over expressed protein for which the antibody or binding portion thereof is specific.

52. A method of kidney cancer treatment comprising blocking an over expressed protein selected from the group consisting of scavenger receptor class B, adenosine receptor A3, CD97 antigen, APO E-C2 gene, basement membrane-induced gene, integrin alpha 5 (fibronectin receptor, alpha polypeptide), peptide transporter 3, hypothetical protein FLJ22341, solute carrier family 16 (monocarboxylic acid transporters), interleukin 10 receptor alpha, FXYD domain-containing ion transport regulator 5, retinoic acid receptor responder (tazarotene induced) 2, integrin alpha X (antigen CD11C (p150), alpha polypeptide), sema domain seven thrombospondin repeats (type 1 and type 1-like) transmembrane domain (TM) and short cytoplasmic domain (semaphorin) 5B, guanylate binding protein 1 interferon-inducible 67 kD, leukocyte immunoglobulin-like receptor subfamily B, discoidin domain receptor family member 2, caveolin 1 caveolae protein 22 kD, chloride intracellular channel 1, CD36 antigen (collagen type I receptor, thrombospondin recep), small inducible cytokine A4 (homologous to mouse Mip-1b), lysosomal-associated multispanning membrane protein-5, integrin beta 2 antigen CD18 (p95) lymphocyte funtion-assoc, chemokine (C-X-C motif) receptor 4 (fusin), CD2 antigen (p50) sheep red blood cell receptor and epithelial membrane protein 3.

The application's sequence listing, which the Patent Office published only in electronic form, follows.

SEQUENCE LISTING (385 sequences)

SEQ ID NO: 1 - DNA, 6704 bp, Homo sapiens
gtgggataaaggaatgaggttcagaaaggggcagggagttgcccgcagccgcaccgcacgtcttcagcccgaccgttgtcctgacctctctgtcccgtcccctgcccagtctcaccatggccttctggacacagctgatgctgctgctctggaagaatttcatgtatcgccggagacagccggtccagctcctggtcgaattgctgtggcctctcttcctcttcttcatcctggtggctgttcgccactcccacccgcccctggagcaccatgaatgccacttcccaaacaagccactgccatcggcgggcaccgtgccctggctccagggtctcatctgtaatgtgaacaacacctgctttccgcagctgacaccgggcgaggagcccgggcgcctgagcaacttcaacgactccctggtctcccggctgctagccgatgcccgcactgtgctgggaggggccagtgcccacaggacgctggctggcctagggaagctgatcgccacgctgagggctgcacgcagcacggcccagcctcaaccaaccaagcagtctccactggaaccacccatgctggatgtcgcggagctgctgacgtcactgctgcgcacggaatccctggggttggcactgggccaagcccaggagcccttgcacagcttgttggaggccgctggggacctggcccaggagctcctggcgctgcgcagcctggtggagcttcgggcactgctgcagagaccccgagggaccagcggccccctggagttgctgtcagaggccctctgcagtgtcaggggacctagcagcacagtgggcccctccctcaactggtacgaggctagtgacctgatggagctggtggggcaggagccagaatccgccctgccagacagcagcctgagccccgcctgctcggagctgattggagccctggacagccacccgctgtcccgcctgctctggagacgcctgaagcctctgatcctcgggaagctactctttgcaccagatacaccttttacccggaagctcatggcccaggtgaaccggaccttcgaggagctcaccctgctgagggatgtccgggaggtgtgggagatgctgggaccccggatcttcaccttcatgaacgacagttccaatgtggccatgctgcagcggctcctgcagatgcaggatgaaggaagaaggcagcccagacctggaggccgggaccacatggaggccctgcgatcctttctggaccctgggagcggtggctacagctggcaggacgcacacgctgatgtggggcacctggtgggcacgctgggccgagtgacggagtgcctgtccttggacaagctggaggcggcaccctcagaggcagccctggtgtcgcgggccctgcaactgctcgcggaacatcgattctgggccggcgtcgtcttcttgggacctgaggactcttcagaccccacagagcacccaaccccagacctgggccccggccacgtgcgcatcaaaatccgcatggacattgacgtggtcacgaggaccaataagatcagggacaggttttgggaccctggcccagccgcggaccccctgaccgacctgcgctacgtgtggggcggcttcgtgtacctgcaagacctggtggagcgtgcagccgtccgcgtgctcagcggcgccaacccccgggccggcctctacctgcagcagatgccctatccgtgctatgtggacgacgtgttcctgcgtgtgctgagccggtcgctgccgctcttcctgacgctggcctggatctactccgtgacactgacagtgaaggccgtggtgcgggagaaggagacgcggctgcgggacaccatgcgcgccatggggctcagccgcgcggtgctctggctaggctggttcctcagctgcctcgggcccttcctgctcagcgccgcactgctggttctggtgctcaagctgggagacatcctcccctacagccacccgggcgtggtcttcctgttcttggcagccttcgcggtggccacggtgacccagagcttcctgctcagcgccttcttctcccgcgccaacctggctgcggcctgcggcggcctggcctacttctccctctacctgccctacgtgctgtgtgtggcttggcgggaccggctgcccgcgggtggccgcgtggccgcgagcctgctgtcgcccgtggccttcggcttcggctgcgagagcctggctctgctggaggagcagggcgagggcgcgcagtggcacaacgtgggcacccggcctacggcagacgtcttcagcctggcccaggtctctggccttctgctgctggacgcggcgctctacggcctcgccacctggtacctggaagctgtgtgcccaggccagtacgggatccctgaaccatggaattttccttttcggaggagctactggtgcggacctcggccccccaagagtccagccccttgccccaccccgctggacccaaaggtgctggtagaagaggcaccgcccggcctgagtcctggcgtctccgttcgcagcctggagaagcgctttcctggaagcccgcagccagccctgcgggggctcagcctggacttctaccagggccacatcaccgccttcctgggccacaacggggccggcaagaccaccaccctgtccatcttgagtggcctcttcccacccagtggtggctctgccttcatcctgggccacgacgtccgctccagcatggccgccatccggccccacctgggcgtctgtcctcagtacaacgtgctgtttgacatgctgaccgtggacgagcacgtctggttctatgggcggctgaagggtctgagtgccgctgtagtgggccccgagcaggaccgtctgctgcaggatgtggggctggtctccaagcagagtgtgcagactcgccacctctctggtgggatgcaacggaagctgtccgtggccattgcctttgtgggcggctcccaagttgttatcctggacgagcctacggctggcgtggatcctgcttcccgccgcggtatttgggagctgctgctcaaataccgagaaggtcgcacgctgatcctctccacccaccacctggatgaggcagagctgctgggagaccgtgtggccgtggtggcaggtggccgcttgtgctgctgtggctccccactcttcctgcgccgtcacctgggctccggctactacctgacgctggtgaaggcccgcctgcccctgaccaccaatgagaaggctgacactgacatggagggcagtgtggacaccaggcaggaaaagaagaatggcagccagggcagcagagtcggcactcctcagctgctggccctggtacagcactgggtgcccggggcacggctggtggaggagctgccacacgagctggtgctggtgctgccctacacgggtgcccatgacggcagcttcgccacactcttccgagagctagacacgcggctggcggagctgaggctcactggctacgggatctccgacaccagcctcgaggagatcttcctgaaggtggtggaggagtgtgctgcggacacagatatggaggatggcagctgcgggcagcacctatgcacaggcattgctggcctagacgtaaccctacggctcaagatgccgccacaggagacagcgctggagaacggggaaccagctgggtcagccccagagactgaccagggctctgggccagacgccgtgggccgggtacagggctgggcactgacccgccagcagctccaggccctgcttctcaagcgctttctgcttgcccgccgcagccgccgcggcctgttcgcccagatcgtgctgcctgccctctttgtgggcctggccctcgtgttcagcctcatcgtgcctcctttcgggcactacccggctctgcggctcagtcccaccatgtacggtgctcaggtgtccttcttcagtgaggacgccccaggggaccctggacgtgcccggctgctcgaggcgctgctgcaggaggcaggactggaggagcccccagtgcagcatagctcccacaggttctcggcaccagaagttcctgctgaagtggccaaggtcttggccagtggcaactggaccccagagtctccatccccagcctgccagtgtagccggcccggtgcccggcgcctgctgcccgactgcccggctgcagctggtggtccccctccgccccaggcagtgaccggctctggggaagtggttcagaacctgacaggccggaacctgtctgacttcctggtcaagacctacccgcgcctggtgcgccagggcctgaagactaagaagtgggtgaatgaggtcagatacggaggcttctcgctggggggccgagacccaggcctgccctcgggccaagagttgggccgctcagtggaggagttgtgggcgctgctgagtcccctgcctggcggggccctcgaccgtgtcctgaaaaacctcacagcctgggctcacagcctggatgctcaggacagtctcaagatctggttcaacaacaaaggctggcactccatggtggcctttgtcaaccgagccagcaacgcaatcctccgtgctcacctgcccccaggcccggcccgccacgcccacagcatcaccacactcaaccaccccttgaacctcaccaaggagcagctgtctgaggctgcactgatggcctcctcggtggacgtcctcgtctccatctgtgtggtctttgccatgtcctttgtcccggccagcttcactcttgtcctcattgaggagcgagtcacccgagccaagcacctgcagctcatggggggcctgtcccccaccctctactggcttggcaactttctctgggacatgtgtaactacttggtgccagcatgcatcgtggtgctcatctttctggccttccagcagagggcatatgtggcccctgccaacctgcctgctctcctgctgttgctactactgtatggctggtcgatcacaccgctcatgtacccagcctccttcttcttctccgtgcccagcacagcctatgtggtgctcacctgcataaacctctttattggcatcaatggaagcatggccacctttgtgcttgagctcttctctgatcagaagctgcaggaggtgagccggatcttgaaacaggtcttccttatcttcccccacttctgcttgggccgggggctcattgacatggtgcggaaccaggccatggctgatgcctttgagcgcttgggagacaggcagttccagtcacccctgcgctgggaggtggtcggcaagaacctcttggccatggtgatacaggggcccctcttccttctcttcacactactgctgcagcaccgaagccaactcctgccacagcccagggtgaggtctctgccactcctgggagaggaggacgaggatgtagcccgtgaacgggagcgggtggtccaaggagccacccagggggatgtgttggtgctgaggaacttgaccaaggtataccgtgggcagaggatgccagctgttgaccgcttgtgcctggggattccccctggtgagtgttttgggctgctgggtgtgaatggagcagggaagacgtccacgtttcgcatggtgacgggggacacattggccagcaggggcgaggctgtgctggcaggccacagcgtggcccgggaacccagtgctgcgcacctcagcatgggatactgccctcaatccgatgccatctttgagctgctgacgggccgcgagcacctggagctgcttgcgcgcctgcgcggtgtcccggaggcccaggttgcccagaccgctggctcgggcctggcgcgtctgggactctcatggtacgcagaccggcctgcaggcacctacagcggagggaacaaacgcaagctggcgacggccctggcgctggttggggacccagccgtggtgtttctggacgagccgaccacaggcatggaccccagcgcgcggcgcttcctttggaacagccttttggccgtggtgcgggagggccgttcagtgatgctcacctcccatagcatggaggagtgtgaagcgctctgctcgcgcctagccatcatggtgaatgggcggttccgctgcctgggcagcccgcaacatctcaagggcagattcgcggcgggtcacacactgaccctgcgggtgcccgccgcaaggtcccagccggcagcggccttcgtggcggccgagttccctgggtcggagctgcgcgaggcacatggaggccgcctgcgcttccagctgccgccgggagggcgctgcgccctggcgcgcgtctttggagagctggcggtgcacggcgcagagcacggcgtggaggacttttccgtgagccagacgatgctggaggaggtattcttgtacttctccaaggaccaggggaaggacgaggacaccgaagagcagaaggaggcaggagtgggagtggaccccgcgccaggcctgcagcaccccaaacgcgtcagccagttcctcgatgaccctagcactgccgagactgtgctctgagcctccctcccctgcggggccgcggggaggccctgggaatggcaagggcaaggtagagtgcctaggagccctggactcaggctggcagaggggctggtgccctggagaaaataaagagaaggctggagagaagccgtggtggtgaaa

SEQ ID NO: 2 - DNA, 1501 bp, Homo sapiens
ggcagttccagtcacccctgcgctgggaggtggtcggcaagaacctcttggccatggtgatacaggggcccctcttccttctcttcacactactgctgcagcaccgaagccaactcctgccacagcccagggtgaggtctctgccactcctgggagaggaggacgaggatgtagcccgtgaacgggagcgggtggtccaaggagccacccagggggatgtgttggtgctgaggaacttgaccaaggtataccgtgggcagaggatgccagctgttgaccgcttgtgcctggggattccccctggtgagtgttttgggctgctgggtgtgaatggagcagggaagacgtccacgtttcgcatggtgacgggggacacattggccagcaggggcgaggctgtgctggcaggccacagcgtggcccgggaacccagtgctgcgcacctcagcatgggatactgccctcaatccgatgccatctttgagctgctgacgggccgcgagcacctggagctgcttgcgcgcctgcgcggtgtcccggaggcccaggttgcccagaccgctggctcgggcctggcgcgtctgggactctcatggtacgcagaccggcctgcaggcacctacagcggagggaacaaacgcaagctggcgacggccctggcgctggttggggacccagccgtggtgtttctggacgagccgaccacaggcatggaccccagcgcgcggcgcttcctttggaacagccttttggccgtggtgcgggagggccgttcagtgatgctcacctcccataggtgggccgggctctgatgccctgggctgtggttaagcatggaggagtgtgaagcgctctgctcgcgcctagccatcatggtgaatgggcggttccgctgcctgggcagcccgcaacatctcaagggcagattcgcggcgggtcacacactgaccctgcgggtgcccgccgcaaggtcccagccggcagcggccttcgtggcggccgagttccctgggtcggagctgcgcgaggcacatggaggtcgcctgcgcttccagctgccgccgggagggcgctgcgccctggcgcgcgtctttggagagctggcggtgcacggcgcagagcacggcgtggaggacttttccgtgagccagacgatgctggaggaggtattcttgtacttctccaaggaccaggggaaggacgaggacaccgaagagcagaaggaggcaggagtgggagtggaccccgcgccaggcctgcagcaccccaaacgcgtcagccagttcctcgatgaccctagcactgccgagactgtgctctgagcctccctcccctgcggggccgcggggaggccctgggaatggcaagggcaaggtagagtgcctaggagccctggactcaggctggcagaggggctggtgccctggagaaaataaagagaaggctggagagaagccgtgctggtgaaaaaaaaaaaaaaaaaaaaaaaaaaaaaaaaaag

SEQ ID NO: 3 - DNA, 6704 bp, Homo sapiens
gtgggataaaggaatgaggttcagaaaggggcagggagttgcccgcagccgcaccgcacgtcttcagcccgaccgttgtcctgacctctctgtcccgtcccctgcccagtctcaccatggccttctggacacagctgatgctgctgctctggaagaatttcatgtatcgccggagacagccggtccagctcctggtcgaattgctgtggcctctcttcctcttcttcatcctggtggctgttcgccactcccacccgcccctggagcaccatgaatgccacttcccaaacaagccactgccatcggcgggcaccgtgccctggctccagggtctcatctgtaatgtgaacaacacctgctttccgcagctgacaccgggcgaggagcccgggcgcctgagcaacttcaacgactccctggtctcccggctgctagccgatgcccgcactgtgctgggaggggccagtgcccacaggacgctggctggcctagggaagctgatcgccacgctgagggctgcacgcagcacggcccagcctcaaccaaccaagcagtctccactggaaccacccatgctggatgtcgcggagctgctgacgtcactgctgcgcacggaatccctggggttggcactgggccaagcccaggagcccttgcacagcttgttggaggccgctgaggacctggcccaggagctcctggcgctgcgcagcctggtggagcttcgggcactgctgcagagaccccgagggaccagcggccccctggagttgctgtcagaggccctctgcagtgtcaggggacctagcagcacagtgggcccctccctcaactggtacgaggctagtgacctgatggagctggtggggcaggagccagaatccgccctgccagacagcagcctgagccccgcctgctcggagctgattggagccctggacagccacccgctgtcccgcctgctctggagacgcctgaagcctctgatcctcgggaagctactctttgcaccagatacaccttttacccggaagctcatggcccaggtcaaccggaccttcgaggagctcaccctgctgagggatgtccgggaggtgtgggagatgctgggaccccggatcttcaccttcatgaacgacagttccaatgtggccatgctgcagcggctcctgcagatgcaggatgaaggaagaaggcagcccagacctggaggccgggaccacatggaggccctgcgatcctttctggaccctgggagcggtggctacagctggcaggacgcacacgctgatgtggggcacctggtgggcacgctgggccgagtgacggagtgcctgtccttggacaagctggaggcggcaccctcagaggcagccctggtgtcgcgggccctgcaactgctcgcggaacatcgattctgggccggcgtcgtcttcttgggacctgaggactcttcagaccccacagagcacccaaccccagacctgggccccggccacgtgcgcatcaaaatccgcatggacattgacgtggtcacgaggaccaataagatcagggacaggttttgggaccctggcccagccgcggaccccctgaccgacctgcgctacgtgtggggcggcttcgtgtacctgcaagacctggtggagcgtgcagccgtccgcgtgctcagcggcgccaacccccgggccggcctctacctgcagcagatgccctatccgtgctatgtggacgacgtgttcctgcgtgtgctgagccggtcgctgccgctcttcctgacgctggcctggatctactccgtgacactgacagtgaaggccgtggtgcgggagaaggagacgcggctgcgggacaccatgcgcgccatggggctcagccgcgcggtgctctggctaggctggttcctcagctgcctcgggcccttcctgctcagcgccgcactgctggttctggtgctcaagctgggagacatcctcccctacagccacccgggcgtggtcttcctgttcttggcagccttcgcggtggccacggtgacccagagcttcctgctcagcgccttcttctcccgcgccaacctggctgcggcctgcggcggcctggcctacttctccctctacctgccctacgtgctgtgtgtggcttggcgggaccggctgcccgcgggtggccgcgtggccgcgagcctgctgtcgcccgtggccttcggcttcggctgcgagagcctggctctgctggaggagcagggcgagggcgcgcagtggcacaacgtgggcacccggcctacggcagacgtcttcagcctggcccaggtctctggccttctgctgctggacgcggcgctctacggcctcgccacctggtacctggaagctgtgtgcccaggccagtacgggatccctgaaccatggaattttccttttcggaggagctactggtgcggacctcggccccccaagagtccagccccttgccccaccccgctggacccaaaggtgctggtagaagaggcaccgcccggcctgagtcctggcgtctccgttcgcagcctggagaagcgctttcctggaagcccgcagccagccctgcgggggctcagcctggacttctaccagggccacatcaccgccttcctgggccacaacggggccggcaagaccaccaccctgtccatcttgagtggcctcttcccacccagtggtggctctgccttcatcctgggccacgacgtccgctccagcatggccgccatccggccccacctgggcgtctgtcctcagtacaacgtgctgtttgacatgctgaccgtggacgagcacgtctggttctatgggcggctgaagggtctgagtgccgctgtagtgggccccgagcaggaccgtctgctgcaggatgtggggctggtctccaagcagagtgtgcagactcgccacctctctggtgggatgcaacggaagctgtccgtggccattgcctttgtgggcggctcccaagttgttatcctggacgagcctacggctggcgtggatcctgcttcccgccgcggtatttgggagctgctgctcaaataccgagaaggtcgcacgctgatcctctccacccaccacctggatgaggcagagctgctgggagaccgtgtggctgtggtggcaggtggccgcttgtgctgctgtggctccccactcttcctgcgccgtcacctgggctccggctactacctgacgctggtgaaggcccgcctgcccctgaccaccaatgagaaggctgacactgacatggagggcagtgtggacaccaggcaggaaaagaagaatggcagccagggcagcagagtcggcactcctcagctgctggccctggtacagcactgggtgcccggggcacggctggtggaggagctgccacacgagctggtgctggtgctgccctacacgggtgcccatgacggcagcttcgccacactcttccgagagctagacacgcggctggcggagctgaggctcactggctacgggatctccgacaccagcctcgaggagatcttcctgaaggtggtggaggagtgtgctgcggacacagatatggaggatggcagctgcgggcagcacctatgcacaggcattgctggcctagacgtaaccctgcggctcaagatgccgccacaggagacagcgctggagaacggggaaccagctgggtcagccccagagactgaccagggctctgggccagacgccgtgggccgggtacagggctgggcactgacccgccagcagctccaggccctgcttctcaagcgctttctgcttgcccgccgcagccgccgcggcctgttcgcccagatcgtgctgcctgccctctttgtgggcctggccctcgtgttcagcctcatcgtgcctcctttcgggcactacccggctctgcggctcagtcccaccatgtacggtgctcaggtgtccttcttcagtgaggacgccccaggggaccctggacgtgcccggctgctcgaggcgctgctgcaggaggcaggactggaggagcccccagtgcagcatagctcccacaggttctcggcaccagaagttcctgctgaagtggccaaggtcttggccagtggcaactggaccccagagtctccatccccagcctgccagtgtagccagcccggtgcccggcgcctgctgcccgactgcccggctgcagctggtggtccccctccgccccaggcagtgaccggctctggggaagtggttcagaacctgacaggccggaacctgtctgacttcctggtcaagacctacccgcgcctggtgcgccagggcctgaagactaagaagtgggtgaatgaggtcaggtacggaggcttctcgctggggggccgagacccaggcctgccctcgggccaagagttgggccgctcagtggaggagttgtgggcgctgctgagtcccctgcctggcggggccctcgaccgtgtcctgaaaaacctcacagcctgggctcacagcctggacgctcaggacagtctcaagatctggttcaacaacaaaggctggcactccatggtggcctttgtcaaccgagccagcaacgcaatcctccgtgctcacctgcccccaggccgggcccgccacgcccacagcatcaccacactcaaccaccccttgaacctcaccaaggagcagctgtttgaggctgcattgatggcctcctcggtggacgtcctcgtctccatctgtgtggtctttgccatgtcctttgtcccggccagcttcactcttgtcctcattgaggagcgagtcacccgagccaagcacctgcagctcatggggggcctgtcccccaccctctactggcttggcaactttctctgggacatgtgtaactacttggtgccagcatgcatcgtggtgctcatctttctggccttccagcagagggcatatgtggcccctgccaacctgcctgctctcctgctgttgctactactgtatggctggtcgatcacaccgctcatgtacccagcctccttcttcttctccgtgcccagcacagcctatgtggtgctcacctgcataaacctctttattggcatcaatggaagcatggccacctttgtgcttgagctcttctctgatcagaagctgcaggaggtgagccggatcttgaaacaggtcttccttatcttcccccacttctgcttgggccgggggcttattgacatggtgcggaaccaggccatggctgatgcctttgagcgcttgggagacaggcagttccagtcacccctgcgctgggaggtggtcggcaagaacctcttggccatggtgatacaggggcccctcttccttctcttcacactactgctgcagcaccgaagccaactcctgccacagcccagggtgaggtctctgccactcctgggagaggaggacgaggatgtagcccgtgaacgggagcgggtggtccaaggagccacccagggggatgtgttggtgctgaggaacttgaccaaggtataccgtgggcagaggatgccagctgttgaccgcttgtgcctggggattccccctggtgagtgttttgggctgctgggtgtgaatggagcagggaagacgtccacgtttcgcatggtgacgggggacacattggccagcaggggcgaggctgtgctggcaggccacagcgtggcccgggaacccagtgctgcgcacctcagcatgggatactgccctcaatccgatgccatctttgagctgctgacgggccgcgagcacctggagctgcttgcgcgcctgcgcggtgtcccggaggcccaggttgcccagaccgctggctcgggcctggcgcgtctgggactctcatggtacgcagaccggcctgcaggcacctacagcggagggaacaaacgcaagctggcgacggccctggcgctggttggggacccagccgtggtgtttctggacgagccgaccacaggcatggaccccagcgcgcggcgcttcctttggaacagccttttggccgtggtgcgggagggccgttcagtgatgctcacctcccatagcatggaggagtgtgaagcgctctgctcgcgcctagccatcatggtgaatgggcggttccgctgcctgggcagcccgcaacatctcaagggcagattcgcggcgggtcacacactgaccctgcgggtgcccgccgcaaggtcccagccggcagcggccttcgtggcggccgagttccctgggtcggagctgcgcgaggcacatggaggccgcctgcgcttccagctgccgccgggagggcgctgcgccctggcgcgcgtctttggagagctggcggtgcacggcgcagagcacggcgtggaggacttttccgtgagccagacgatgctggaggaggtattcttgtacttctccaaggaccaggggaaggacgaggacaccgaagagcagaaggaggcaggagtgggagtggaccccgcgccaggcctgcagcaccccaaacgcgtcagccagttcctcgatgaccctagcactgccgagactgtgctctgagcctccctcccctgcggggccgcggggaggccctgggaatggcaagggcaaggtagagtgcctaggagccctggactcaggctggcagaggggctggtgccctggagaaaataaagagaaggctggagagaagccgtggtggtgaaa

SEQ ID NO: 4 - DNA, 6588 bp, Homo sapiens
atggccttctggacacagctgatgctgctgctctggaagaatttcatgtatcgccggagacagccggtccagctcctggtcgaattgctgtggcctctcttcctcttcttcatcctggtggctgttcgccactcccacccgcccctggagcaccatgaatgccacttcccaaacaagccactgccatcggcgggcaccgtgccctggctccagggtctcatctgtaatgtgaacaacacctgctttccgcagctgacaccgggcgaggagcccgggcgcctgagcaacttcaacgactccctggtctcccggctgctagccgatgcccgcactgtgctgggaggggccagtgcccacaggacgctggctggcctagggaagctgatcgccacgctgagggctgcacgcagcacggcccagcctcaaccaaccaagcagtctccactggaaccacccatgctggatgtcgcggagctgctgacgtcactgctgcgcacggaatccctggggttggcactgggccaagcccaggagcccttgcacagcttgttggaggccgctgaggacctggcccaggagctcctggcgctgcgcagcctggtggagcttcgggcactgctgcagagaccccgagggaccagcggccccctggagttgctgtcagaggccctctgcagtgtcaggggacctagcagcacagtgggcccctccctcaactggtacgaggctagtgacctgatggagctggtggggcaggagccagaatccgccctgccagacagcagcctgagccccgcctgctcggagctgattggagccctggacagccacccgctgtcccgcctgctctggagacgcctgaagcctctgatcctcgggaagctactctttgcaccagatacaccttttacccggaagctcatggcccaggtcaaccggaccttcgaggagctcaccctgctgagggatgtccgggaggtgtgggagatgctgggaccccggatcttcaccttcatgaacgacagttccaatgtggccatgctgcagcggctcctgcagatgcaggatgaaggaagaaggcagcccagacctggaggccgggaccacatggaggccctgcgatcctttctggaccctgggagcggtggctacagctggcaggacgcacacgctgatgtggggcacctggtgggcacgctgggccgagtgacggagtgcctgtccttggacaagctggaggcggcaccctcagaggcagccctggtgtcgcgggccctgcaactgctcgcggaacatcgattctgggccggcgtcgtcttcttgggacctgaggactcttcagaccccacagagcacccaaccccagacctgggccccggccacgtgcgcatcaaaatccgcatggacattgacgtggtcacgaggaccaataagatcagggacaggttttgggaccctggcccagccgcggaccccctgaccgacctgcgctacgtgtggggcggcttcgtgtacctgcaagacctggtggagcgtgcagccgtccgcgtgctcagcggcgccaacccccgggccggcctctacctgcagcagatgccctatccgtgctatgtggacgacgtgttcctgcgtgtgctgagccggtcgctgccgctcttcctgacgctggcctggatctactccgtgacactgacagtgaaggccgtggtgcgggagaaggagacgcggctgcgggacaccatgcgcgccatggggctcagccgcgcggtgctctggctaggctggttcctcagctgcctcgggcccttcctgctcagcgccgcactgctggttctggtgctcaagctgggagacatcctcccctacagccacccgggcgtggtcttcctgttcttggcagccttcgcggtggccacggtgacccagagcttcctgctcagcgccttcttctcccgcgccaacctggctgcggcctgcggcggcctggcctacttctccctctacctgccctacgtgctgtgtgtggcttggcgggaccggctgcccgcgggtggccgcgtggccgcgagcctgctgtcgcccgtggccttcggcttcggctgcgagagcctggctctgctggaggagcagggcgagggcgcgcagtggcacaacgtgggcacccggcctacggcagacgtcttcagcctggcccaggtctctggccttctgctgctggacgcggcgctctacggcctcgccacctggtacctggaagctgtgtgcccaggccagtacgggatccctgaaccatggaattttccttttcggaggagctactggtgcggacctcggccccccaagagtccagccccttgccccaccccgctggacccaaaggtgctggtagaagaggcaccgcccggcctgagtcctggcgtctccgttcgcagcctggagaagcgctttcctggaagcccgcagccagccctgcgggggctcagcctggacttctaccagggccacatcaccgccttcctgggccacaacggggccggcaagaccaccaccctgtccatcttgagtggcctcttcccacccagtggtggctctgccttcatcctgggccacgacgtccgctccagcatggccgccatccggccccacctgggcgtctgtcctcagtacaacgtgctgtttgacatgctgaccgtggacgagcacgtctggttctatgggcggctgaagggtctgagtgccgctgtagtgggccccgagcaggaccgtctgctgcaggatgtggggctggtctccaagcagagtgtgcagactcgccacctctctggtgggatgcaacggaagctgtccgtggccattgcctttgtgggcggctcccaagttgttatcctggacgagcctacggctggcgtggatcctgcttcccgccgcggtatttgggagctgctgctcaaataccgagaaggtcgcacgctgatcctctccacccaccacctggatgaggcagagctgctgggagaccgtgtggctgtggtggcaggtggccgcttgtgctgctgtggctccccactcttcctgcgccgtcacctgggctccggctactacctgacgctggtgaaggcccgcctgcccctgaccaccaatgagaaggctgacactgacatggagggcagtgtggacaccaggcaggaaaagaagaatggcagccagggcagcagagtcggcactcctcagctgctggccctggtacagcactgggtgcccggggcacggctggtggaggagctgccacacgagctggtgctggtgctgccctacacgggtgcccatgacggcagcttcgccacactcttccgagagctagacacgcggctggcggagctgaggctcactggctacgggatctccgacaccagcctcgaggagatcttcctgaaggtggtggaggagtgtgctgcggacacagatatggaggatggcagctgcgggcagcacctatgcacaggcattgctggcctagacgtaaccctgcggctcaagatgccgccacaggagacagcgctggagaacggggaaccagctgggtcagccccagagactgaccagggctctgggccagacgccgtgggccgggtacagggctgggcactgacccgccagcagctccaggccctgcttctcaagcgctttctgcttgcccgccgcagccgccgcggcctgttcgcccagatcgtgctgcctgccctctttgtgggcctggccctcgtgttcagcctcatcgtgcctcctttcgggcactacccggctctgcggctcagtcccaccatgtacggtgctcaggtgtccttcttcagtgaggacgccccaggggaccctggacgtgcccggctgctcgaggcgctgctgcaggaggcaggactggaggagcccccagtgcagcatagctcccacaggttctcggcaccagaagttcctgctgaagtggccaaggtcttggccagtggcaactggaccccagagtctccatccccagcctgccagtgtagccagcccggtgcccggcgcctgctgcccgactgcccggctgcagctggtggtccccctccgccccaggcagtgaccggctctggggaagtggttcagaacctgacaggccggaacctgtctgacttcctggtcaagacctacccgcgcctggtgcgccagggcctgaagactaagaagtgggtgaatgaggtcaggtacggaggcttctcgctggggggccgagacccaggcctgccctcgggccaagagttgggccgctcagtggaggagttgtgggcgctgctgagtcccctgcctggcggggccctcgaccgtgtcctgaaaaacctcacagcctgggctcacagcctggacgctcaggacagtctcaagatctggttcaacaacaaaggctggcactccatggtggcctttgtcaaccgagccagcaacgcaatcctccgtgctcacctgcccccaggccgggcccgccacgcccacagcatcaccacactcaaccaccccttgaacctcaccaaggagcagctgtttgaggctgcattgatggcctcctcggtggacgtcctcgtctccatctgtgtggtctttgccatgtcctttgtcccggccagcttcactcttgtcctcattgaggagcgagtcacccgagccaagcacctgcagctcatggggggcctgtcccccaccctctactggcttggcaactttctctgggacatgtgtaactacttggtgccagcatgcatcgtggtgctcatctttctggccttccagcagagggcatatgtggcccctgccaacctgcctgctctcctgctgttgctactactgtatggctggtcgatcacaccgctcatgtacccagcctccttcttcttctccgtgcccagcacagcctatgtggtgctcacctgcataaacctctttattggcatcaatggaagcatggccacctttgtgcttgagctcttctctgatcagaagctgcaggaggtgagccggatcttgaaacaggtcttccttatcttcccccacttctgcttgggccgggggcttattgacatggtgcggaaccaggccatggctgatgcctttgagcgcttgggagacaggcagttccagtcacccctgcgctgggaggtggtcggcaagaacctcttggccatggtgatacaggggcccctcttccttctcttcacactactgctgcagcaccgaagccaactcctgccacagcccagggtgaggtctctgccactcctgggagaggaggacgaggatgtagcccgtgaacgggagcgggtggtccaaggagccacccagggggatgtgttggtgctgaggaacttgaccaaggtataccgtgggcagaggatgccagctgttgaccgcttgtgcctggggattccccctggtgagtgttttgggctgctgggtgtgaatggagcagggaagacgtccacgtttcgcatggtgacgggggacacattggccagcaggggcgaggctgtgctggcaggccacagcgtggcccgggaacccagtgctgcgcacctcagcatgggatactgccctcaatccgatgccatctttgagctgctgacgggccgcgagcacctggagctgcttgcgcgcctgcgcggtgtcccggaggcccaggttgcccagaccgctggctcgggcctggcgcgtctgggactctcatggtacgcagaccggcctgcaggcacctacagcggagggaacaaacgcaagctggcgacggccctggcgctggttggggacccagccgtggtgtttctggacgagccgaccacaggcatggaccccagcgcgcggcgcttcctttggaacagccttttggccgtggtgcgggagggccgttcagtgatgctcacctcccatagcatggaggagtgtgaagcgctctgctcgcgcctagccatcatggtgaatgggcggttccgctgcctgggcagcccgcaacatctcaagggcagattcgcggcgggtcacacactgaccctgcgggtgcccgccgcaaggtcccagccggcagcggccttcgtggcggccgagttccctgggtcggagctgcgcgaggcacatggaggccgcctgcgcttccagctgccgccgggagggcgctgcgccctggcgcgcgtctttggagagctggcggtgcacggcgcagagcacggcgtggaggacttttccgtgagccagacgatgctggaggaggtattcttgtacttctccaaggaccaggggaaggacgaggacaccgaagagcagaaggaggcaggagtgggagtggaccccgcgccaggcctgcagcaccccaaacgcgtcagccagttcctcgatgaccctagcactgccgagactgtgctctgagcctccctcccctgcggggccgcggggaggccctgggaatggcaagggcaaggtagagtgcctaggagccctggactcaggctggcagaggggctggtgccctggagaaaataaagagaaggctggagagaagccgtgcttggtgaa

SEQ ID NO: 5 - DNA, 6027 bp, Homo sapiens
atggtctgcctgggaactggccagagcgctggacccctagtgagtgttcaaaatcattgtcccccttgtggtctttctccccaggaatccctggggttggcactgggccaagcccaggagcccttgcacagcttgttggaggccgctgaggacctggcccaggagctcctggcgctgcgcagcctggtggagcttcgggcactgctgcagagaccccgagggaccagcggccccctggagttgctgtcagaggccctctgcagtgtcaggggacctagcagcacagtgggcccctccctcaactggtacgaggctagtgacctgatggagctggtggggcaggagccagaatccgccctgccagacagcagcctgagccccgcctgctcggagctgattggagccctggacagccacccgctgtcccgcctgctctggagacgcctgaagcctctgatcctcgggaagctactctttgcaccagatacaccttttacccggaagctcatggcccaggtcaaccggaccttcgaggagctcaccctgctgagggatgtccgggaggtgtgggagatgctgggaccccggatcttcaccttcatgaacgacagttccaatgtggccatgctgcagcggctcctgcagatgcaggatgaaggaagaaggcagcccagacctggaggccgggaccacatggaggccctgcgatcctttctggaccctgggagcggtggctacagctggcaggacgcacacgctgatgtggggcacctggtgggcacgctgggccgagtgacggagtgcctgtccttggacaagctggaggcggcaccctcagaggcagccctggtgtcgcgggccctgcaactgctcgcggaacatcgattctgggccggcgtcgtcttcttgggacctgaggactcttcagaccccacagagcacccaaccccagacctgggccccggccacgtgcgcatcaaaatccgcatggacattgacgtggtcacgaggaccaataagatcagggacaggttttgggaccctggcccagccgcggaccccctgaccgacctgcgctacgtgtggggcggcttcgtgtacctgcaagacctggtggagcgtgcagccgtccgcgtgctcagcggcgccaacccccgggccggcctctacctgcagcagatgccctatccgtgctatgtggacgacgtgttcctgcgtgtgctgagccggtcgctgccgctcttcctgacgctggcctggatctactccgtgacactgacagtgaaggccgtggtgcgggagaaggagacgcggctgcgggacaccatgcgcgccatggggctcagccgcgcggtgctctggctaggctggttcctcagctgcctcgggcccttcctgctcagcgccgcactgctggttctggtgctcaagctgggagacatcctcccctacagccacccgggcgtggtcttcctgttcttggcagccttcgcggtggccacggtgacccagagcttcctgctcagcgccttcttctcccgcgccaacctggctgcggcctgcggcggcctggcctacttctccctctacctgccctacgtgctgtgtgtggcttggcgggaccggctgcccgcgggtggccgcgtggccgcgagcctgctgtcgcccgtggccttcggcttcggctgcgagagcctggctctgctggaggagcagggcgagggcgcgcagtggcacaacgtgggcacccggcctacggcagacgtcttcagcctggcccaggtctctggccttctgctgctggacgcggcgctctacggcctcgccacctggtacctggaagctgtgtgcccaggccagtacgggatccctgaaccatggaattttccttttcggaggagctactggtgcggacctcggccccccaagagtccagccccttgccccaccccgctggacccaaaggtgctggtagaagaggcaccgcccggcctgagtcctggcgtctccgttcgcagcctggagaagcgctttcctggaagcccgcagccagccctgcgggggctcagcctggacttctaccagggccacatcaccgccttcctgggccacaacggggccggcaagaccaccaccctgtccatcttgagtggcctcttcccacccagtggtggctctgccttcatcctgggccacgacgtccgctccagcatggccgccatccggccccacctgggcgtctgtcctcagtacaacgtgctgtttgacatgctgaccgtggacgagcacgtctggttctatgggcggctgaagggtctgagtgccgctgtagtgggccccgagcaggaccgtctgctgcaggatgtggggctggtctccaagcagagtgtgcagactcgccacctctctggtgggatgcaacggaagctgtccgtggccattgcctttgtgggcggctcccaagttgttatcctggacgagcctacggctggcgtggatcctgcttcccgccgcggtatttgggagctgctgctcaaataccgagaaggtcgcacgctgatcctctccacccaccacctggatgaggcagagctgctgggagaccgtgtggctgtggtggcaggtggccgcttgtgctgctgtggctccccactcttcctgcgccgtcacctgggctccggctactacctgacgctggtgaaggcccgcctgcccctgaccaccaatgagaaggctgacactgacatggagggcagtgtggacaccaggcaggaaaagaagaatggcagccagggcagcagagtcggcactcctcagctgctggccctggtacagcactgggtgcccggggcacggctggtggaggagctgccacacgagctggtgctggtgctgccctacacgggtgcccatgacggcagcttcgccacactcttccgagagctagacacgcggctggcggagctgaggctcactggctacgggatctccgacaccagcctcgaggagatcttcctgaaggtggtggaggagtgtgctgcggacacagatatggaggatggcagctgcgggcagcacctatgcacaggcattgctggcctagacgtaaccctgcggctcaagatgccgccacaggagacagcgctggagaacggggaaccagctgggtcagccccagagactgaccagggctctgggccagacgccgtgggccgggtacagggctgggcactgacccgccagcagctccaggccctgcttctcaagcgctttctgcttgcccgccgcagccgccgcggcctgttcgcccagatcgtgctgcctgccctctttgtgggcctggccctcgtgttcagcctcatcgtgcctcctttcgggcactacccggctctgcggctcagtcccaccatgtacggtgctcaggtgtccttcttcagtgaggacgccccaggggaccctggacgtgcccggctgctcgaggcgctgctgcaggaggcaggactggaggagcccccagtgcagcatagctcccacaggttctcggcaccagaagttcctgctgaagtggccaaggtcttggccagtggcaactggaccccagagtctccatccccagcctgccagtgtagccagcccggtgcccggcgcctgctgcccgactgcccggctgcagctggtggtccccctccgccccaggcagtgaccggctctggggaagtggttcagaacctgacaggccggaacctgtctgacttcctggtcaagacctacccgcgcctggtgcgccagggcctgaagactaagaagtgggtgaatgaggtcaggtacggaggcttctcgctggggggccgagacccaggcctgccctcgggccaagagttgggccgctcagtggaggagttgtgggcgctgctgagtcccctgcctggcggggccctcgaccgtgtcctgaaaaacctcacagcctgggctcacagcctggacgctcaggacagtctcaagatctggttcaacaacaaaggctggcactccatggtggcctttgtcaaccgagccagcaacgcaatcctccgtgctcacctgcccccaggccgggcccgccacgcccacagcatcaccacactcaaccaccccttgaacctcaccaaggagcagctgtttgaggctgcattgatggcctcctcggtggacgtcctcgtctccatctgtgtggtctttgccatgtcctttgtcccggccagcttcactcttgtcctcattgaggagcgagtcacccgagccaagcacctgcagctcatggggggcctgtcccccaccctctactggcttggcaactttctctgggacatgtgtaactacttggtgccagcatgcatcgtggtgctcatctttctggccttccagcagagggcatatgtggcccctgccaacctgcctgctctcctgctgttgctactactgtatggctggtcgatcacaccgctcatgtacccagcctccttcttcttctccgtgcccagcacagcctatgtggtgctcacctgcataaacctctttattggcatcaatggaagcatggccacctttgtgcttgagctcttctctgatcagaagctgcaggaggtgagccggatcttgaaacaggtcttccttatcttcccccacttctgcttgggccgggggcttattgacatggtgcggaaccaggccatggctgatgcctttgagcgcttgggagacaggcagttccagtcacccctgcgctgggaggtggtcggcaagaacctcttggccatggtgatacaggggcccctcttccttctcttcacactactgctgcagcaccgaagccaactcctgccacagcccagggtgaggtctctgccactcctgggagaggaggacgaggatgtagcccgtgaacgggagcgggtggtccaaggagccacccagggggatgtgttggtgctgaggaacttgaccaaggtataccgtgggcagaggatgccagctgttgaccgcttgtgcctggggattccccctggtgagtgttttgggctgctgggtgtgaatggagcagggaagacgtccacgtttcgcatggtgacgggggacacattggccagcaggggcgaggctgtgctggcaggccacagcgtggcccgggaacccagtgctgcgcacctcagcatgggatactgccctcaatccgatgccatctttgagctgctgacgggccgcgagcacctggagctgcttgcgcgcctgcgcggtgtcccggaggcccaggttgcccagaccgctggctcgggcctggcgcgtctgggactctcatggtacgcagaccggcctgcaggcacctacagcggagggaacaaacgcaagctggcgacggccctggcgctggttggggacccagccgtggtgtttctggacgagccgaccacaggcatggaccccagcgcgcggcgcttcctttggaacagccttttggccgtggtgcgggagggccgttcagtgatgctcacctcccatagcatggaggagtgtgaagcgctctgctcgcgcctagccatcatggtgaatgggcggttccgctgcctgggcagcccgcaacatctcaagggcagattcgcggcgggtcacacactgaccctgcgggtgcccgccgcaaggtcccagccggcagcggccttcgtggcggccgagttccctgggtcggagctgcgcgaggcacatggaggccgcctgcgcttccagctgccgccgggagggcgctgcgccctggcgcgcgtctttggagagctggcggtgcacggcgcagagcacggcgtggaggacttttccgtgagccagacgatgctggaggaggtattcttgtacttctccaaggaccaggggaaggacgaggacaccgaagagcagaaggaggcaggagtgggagtggaccccgcgccaggcctgcagcaccccaaacgcgtcagccagttcctcgatgaccctagcactgccgagactgtgctctga

SEQ ID NO: 6 - DNA, 6174 bp, Homo sapiens
atggtctgcctgggaactggccagagcgctggacccctagtgagtgttcaaaatcattgtcccccttgtggtctttctccccaggaatccctggggttggcactgggccaagcccaggagcccttgcacagcttgttggaggccgctgaggacctggcccaggagctcctggcgctgcgcagcctggtggagcttcgggcactgctgcagagaccccgagggaccagcggccccctggagttgctgtcagaggccctctgcagtgtcaggggacctagcagcacagtgggcccctccctcaactggtacgaggctagtgacctgatggagctggtggggcaggagccagaatccgccctgccagacagcagcctgagccccgcctgctcggagctgattggagccctggacagccacccgctgtcccgcctgctctggagacgcctgaagcctctgatcctcgggaagctactctttgcaccagatacaccttttacccggaagctcatggcccaggtcaaccggaccttcgaggagctcaccctgctgagggatgtccgggaggtgtgggagatgctgggaccccggatcttcaccttcatgaacgacagttccaatgtggccatgctgcagcggctcctgcagatgcaggatgaaggaagaaggcagcccagacctggaggccgggaccacatggaggccctgcgatcctttctggaccctgggagcggtggctacagctggcaggacgcacacgctgatgtggggcacctggtgggcacgctgggccgagtgacggagtgcctgtccttggacaagctggaggcggcaccctcagaggcagccctggtgtcgcgggccctgcaactgctcgcggaacatcgattctgggccggcgtcgtcttcttgggacctgaggactcttcagaccccacagagcacccaaccccagacctgggccccggccacgtgcgcatcaaaatccgcatggacattgacgtggtcacgaggaccaataagatcagggacaggttttgggaccctggcccagccgcggaccccctgaccgacctgcgctacgtgtggggcggcttcgtgtacctgcaagacctggtggagcgtgcagccgtccgcgtgctcagcggcgccaacccccgggccggcctctacctgcagcagatgccctatccgtgctatgtggacgacgtgttcctgcgtgtgctgagccggtcgctgccgctcttcctgacgctggcctggatctactccgtgacactgacagtgaaggccgtggtgcgggagaaggagacgcggctgcgggacaccatgcgcgccatggggctcagccgcgcggtgctctggctaggctggttcctcagctgcctcgggcccttcctgctcagcgccgcactgctggttctggtgctcaagctgggagacatcctcccctacagccacccgggcgtggtcttcctgttcttggcagccttcgcggtggccacggtgacccagagcttcctgctcagcgccttcttctcccgcgccaacctggctgcggcctgcggcggcctggcctacttctccctctacctgccctacgtgctgtgtgtggcttggcgggaccggctgcccgcgggtggccgcgtggccgcgagcctgctgtcgcccgtggccttcggcttcggctgcgagagcctggctctgctggaggagcagggcgagggcgcgcagtggcacaacgtgggcacccggcctacggcagacgtcttcagcctggcccaggtctctggccttctgctgctggacgcggcgctctacggcctcgccacctggtacctggaagctgtgtgcccaggccagtacgggatccctgaaccatggaattttccttttcggaggagctactggtgcggacctcggccccccaagagtccagccccttgccccaccccgctggacccaaaggtgctggtagaagaggcaccgcccggcctgagtcctggcgtctccgttcgcagcctggagaagcgctttcctggaagcccgcagccagccctgcgggggctcagcctggacttctaccagggccacatcaccgccttcctgggccacaacggggccggcaagaccaccaccctgtccatcttgagtggcctcttcccacccagtggtggctctgccttcatcctgggccacgacgtccgctccagcatggccgccatccggccccacctgggcgtctgtcctcagtacaacgtgctgtttgacatgctgaccgtggacgagcacgtctggttctatgggcggctgaagggtctgagtgccgctgtagtgggccccgagcaggaccgtctgctgcaggatgtggggctggtctccaagcagagtgtgcagactcgccacctctctggtgggatgcaacggaagctgtccgtggccattgcctttgtgggcggctcccaagttgttatcctggacgagcctacggctggcgtggatcctgcttcccgccgcggtatttgggagctgctgctcaaataccgagaaggtcgcacgctgatcctctccacccaccacctggatgaggcagagctgctgggagaccgtgtggctgtggtggcaggtggccgcttgtgctgctgtggctccccactcttcctgcgccgtcacctgggctccggctactacctgacgctggtgaaggcccgcctgcccctgaccaccaatgagaaggctgacactgacatggagggcagtgtggacaccaggcaggaaaagaagaatggcagccagggcagcagagtcggcactcctcagctgctggccctggtacagcactgggtgcccggggcacggctggtggaggagctgccacacgagctggtgctggtgctgccctacacgggtgcccatgacggcagcttcgccacactcttccgagagctagacacgcggctggcggagctgaggctcactggctacgggatctccgacaccagcctcgaggagatcttcctgaaggtggtggaggagtgtgctgcggacacagatatggaggatggcagctgcgggcagcacctatgcacaggcattgctggcctagacgtaaccctgcggctcaagatgccgccacaggagacagcgctggagaacggggaaccagctgggtcagccccagagactgaccagggctctgggccagacgccgtgggccgggtacagggctgggcactgacccgccagcagctccaggccctgcttctcaagcgctttctgcttgcccgccgcagccgccgcggcctgttcgcccagatcgtgctgcctgccctctttgtgggcctggccctcgtgttcagcctcatcgtgcctcctttcgggcactacccggctctgcggctcagtcccaccatgtacggtgctcaggtgtccttcttcagtgaggacgccccaggggaccctggacgtgcccggctgctcgaggcgctgctgcaggaggcaggactggaggagcccccagtgcagcatagctcccacaggttctcggcaccagaagttcctgctgaagtggccaaggtcttggccagtggcaactggaccccagagtctccatccccagcctgccagtgtagccagcccggtgcccggcgcctgctgcccgactgcccggctgcagctggtggtccccctccgccccaggcagtgaccggctctggggaagtggttcagaacctgacaggccggaacctgtctgacttcctggtcaagacctacccgcgcctggtgcgccagggcctgaagactaagaagtgggtgaatgaggtcaggtacggaggcttctcgctggggggccgagacccaggcctgccctcgggccaagagttgggccgctcagtggaggagttgtgggcgctgctgagtcccctgcctggcggggccctcgaccgtgtcctgaaaaacctcacagcctgggctcacagcctggacgctcaggacagtctcaagatctggttcaacaacaaaggctggcactccatggtggcctttgtcaaccgagccagcaacgcaatcctccgtgctcacctgcccccaggccgggcccgccacgcccacagcatcaccacactcaaccaccccttgaacctcaccaaggagcagctgtttgaggctgcattgatggcctcctcggtggacgtcctcgtctccatctgtgtggtctttgccatgtcctttgtcccggccagcttcactcttgtcctcattgaggagcgagtcacccgagccaagcacctgcagctcatggggggcctgtcccccaccctctactggcttggcaactttctctgggacatgtgtaactacttggtgccagcatgcatcgtggtgctcatctttctggccttccagcagagggcatatgtggcccctgccaacctgcctgctctcctgctgttgctactactgtatggctggtcgatcacaccgctcatgtacccagcctccttcttcttctccgtgcccagcacagcctatgtggtgctcacctgcataaacctctttattggcatcaatggaagcatggccacctttgtgcttgagctcttctctgatcagaagctgcaggaggtgagccggatcttgaaacaggtcttccttatcttcccccacttctgcttgggccgggggcttattgacatggtgcggaaccaggccatggctgatgcctttgagcgcttgggagacaggcagttccagtcacccctgcgctgggaggtggtcggcaagaacctcttggccatggtgatacaggggcccctcttccttctcttcacactactgctgcagcaccgaagccaactcctgccacagcccagggtgaggtctctgccactcctgggagaggaggacgaggatgtagcccgtgaacgggagcgggtggtccaaggagccacccagggggatgtgttggtgctgaggaacttgaccaaggtataccgtgggcagaggatgccagctgttgaccgcttgtgcctggggattccccctggtgagtgttttgggctgctgggtgtgaatggagcagggaagacgtccacgtttcgcatggtgacgggggacacattggccagcaggggcgaggctgtgctggcaggccacagcgtggcccgggaacccagtgctgcgcacctcagcatgggatactgccctcaatccgatgccatctttgagctgctgacgggccgcgagcacctggagctgcttgcgcgcctgcgcggtgtcccggaggcccaggttgcccagaccgctggctcgggcctggcgcgtctgggactctcatggtacgcagaccggcctgcaggcacctacagcggagggaacaaacgcaagctggcgacggccctggcgctggttggggacccagccgtggtgtttctggacgagccgaccacaggcatggaccccagcgcgcggcgcttcctttggaacagccttttggccgtggtgcgggagggccgttcagtgatgctcacctcccatagcatggaggagtgtgaagcgctctgctcgcgcctagccatcatggtgaatgggcggttccgctgcctgggcagcccgcaacatctcaagggcagattcgcggcgggtcacacactgaccctgcgggtgcccgccgcaaggtcccagccggcagcggccttcgtggcggccgagttccctgggtcggagctgcgcgaggcacatggaggccgcctgcgcttccagctgccgccgggagggcgctgcgccctggcgcgcgtctttggagagctggcggtgcacggcgcagagcacggcgtggaggacttttccgtgagccagacgatgctggaggaggtattcttgtacttctccaaggaccaggggaaggacgaggacaccgaagagcagaaggaggcaggagtgggagtggaccccgcgccaggcctgcagcaccccaaacgcgtcagccagttcctcgatgaccctagcactgccgagactgtgctctgagcctccctcccctgcggggccgcggggaggccctgggaatggcaagggcaaggtagagtgcctaggagccctggactcaggctggcagaggggctggtgccctggagaaaataaagagaaggctggagagaagccgtggtggtgaaa

SEQ ID NO: 7 - DNA, 1879 bp, Homo sapiens
cagcttcactcttgtcctcattgaggagcgagtcacccgagccaagcacctgcagctcatggggggcctgtcccccaccctctactggcttggcaactttctctgggacatgtgtaactacttggtgccagcatgcatcgtggtgctcatctttctggccttccagcagagggcatatgtggcccctgccaacctgcctgctctcctgctgttgctactactgtatggcacagcctatgtggtgctcacctgcataaacctctttattggcatcaatggaagcatggccacctttgtgcttgagctcttctctgatcagaagctgcaggaggtgagccggatcttgaaacaggtcttccttatcttcccccacttctgcttgggccgggggctcattgacatggtgcggaaccaggccatggctgatgcctttgagcgcttgggagacaggcagttccagtcacccctgcgctgggaggtggtcggcaagaacctcttggccatggtgatacaggggcccctcttccttctcttcacactactgctgcagcaccgaagccaactcctgccacagcccagggtgaggtctctgccactcctgggagaggaggacgaggatgtagcccgtgaacgggagcgggtggtccaaggagccacccagggggatgtgttggtgctgaggaacttgaccaaggtataccgtgggcagaggatgccagctgttgaccgcttgtgcctggggattccccctggtgagtgttttgggctgctgggtgtgaatggagcagggaagacgtccacgtttcgcatggtgacgggggacacattggccagcaggggcgaggctgtgctggcaggccacagcgtggcccgggaacccagtgctgcgcacctcagcatgggatactgccctcaatccgatgccatctttgagctgctgacgggccgcgagcacctggagctgcttgcgcgcctgcgcggtgtcccggaggcccaggttgcccagaccgctggctcgggcctggcgcgtctgggactctcatggtacgcagaccggcctgcaggcacctacagcggagggaacaaacgcaagctggcgacggccctggcgctggttggggacccagccgtggtgtttctggacgagccgaccacaggcatggaccccagcgcgcggcgcttcctttggaacagccttttggccgtggtgcgggagggccgttcagtgatgctcacctcccatagcatggaggagtgtgaagcgctctgctcgcgcctggccatcatggtgaatgggcggttccgctgcctgggcagcccgcaacatctcaagggcagattcgcggcgggtcacacactgaccctgcgggtgcccgccgcaaggtcccagccggcagcggccttcgtggcggccgagttccctggggcggagctgcgcgaggcacatggaggccgcctgcgcttccagctgccgccgggagggcgctgcgccctggcgcgcgtctttggagagctggcggtgcacggcgcagagcacggcgtggaggacttttccgtgagccagacgatgctggaggaggtattcttgtacttctccaaggaccaggggaaggacgaggacaccgaagagcagaaggaggcaggagtgggagtggaccccgcgccaggcctgcagcaccccaaacgcgtcagccagttcctcgatgaccctagcactgccgagactgtgctctgagcctccctcccctgcggggccgcggggaggccctgggaatggcaagggcaaggtagagtgcctaggagccctggactcaggctggcagaggggctggtgccctggagaaaataaagagaaggctggagagaagccgtggtggtg

SEQ ID NO: 8 - DNA, 476 bp, Homo sapiens
cctggcgctgcgcagcctggtggagcttcgggcactgctgcagagaccccgagggaccagcggccccctggagttgctgtcagaggccctctgcagtgtcaggggacctagcagcacagtgggcccctccctcaactggtacgaggctagtgacctgatggagctggtggggcaggagccagaatccgccctgccagacagcagcctgagccccgcctgctcggagctgattggagccctggacagccacccgctgtcccgcctgctctggagacgcctgaagcctctgatcctcgggaagctactctttgcaccagatacaccttttacccggaagctcatggcccaggtgaaccggaccttcgaggagctcaccctgctgagggatgtccgggaggtgtgggagatgctgggaccccggatcttcaccttcatgaacgacagttccaatgtggccatgctgcagcggctcctgc

SEQ ID NO: 9 - DNA, 2302 bp, Homo sapiens
ccaaggtctcccccagcactgaggagctcgcctgctgccctcttgcgcgcgggaagcagcaccaagttcacggccaacgccttggcactagggtccagaatggctacaacagtccctgatggttgccgcaatggcctgaaatccaagtactacagactttgtgataaggctgaagcttggggcatcgtcctagaaacggtggccacagccggggttgtgacctcggtggccttcatgctcactctcccgatcctcgtctgcaaggtgcaggactccaacaggcgaaaaatgctgcctactcagtttctcttcctcctgggtgtgttgggcatctttggcctcaccttcgccttcatcatcggactggacgggagcacagggcccacacgcttcttcctctttgggatcctcttttccatctgcttctcctgcctgctggctcatgctgtcagtctgaccaagctcgtccgggggaggaagcccctttccctgttggtgattctgggtctggccgtgggcttcagcctagtccaggatgttatcgctattgaatatattgtcctgaccatgaataggaccaacgtcaatgtcttttctgagctttccgctcctcgtcgcaatgaagactttgtcctcctgctcacctacgtcctcttcttgatggcgctgaccttcctcatgtcctccttcaccttctgtggttccttcacgggctggaagagacatggggcccacatctacctcacgatgctcctctccattgccatctgggtggcctggatcaccctgctcatgcttcctgactttgaccgcaggtgggatgacaccatcctcagctccgccttggctgccaatggctgggtgttcctgttggcttatgttagtcccgagttttggctgctcacaaagcaacgaaaccccatggattatcctgttgaggatgctttctgtaaacctcaactcgtgaagaagagctatggtgtggagaacagagcctactctcaagaggaaatcactcaaggttttgaagagacaggggacacgctctatgccccctattccacacattttcagctgcagaaccagcctccccaaaaggaattctccatcccacgggcccacgcttggccgagcccttacaaagactatgaagtaaagaaagagggcagctaactctgtcctgaagagtgggacaaatgcagccgggcggcagatctagcgggagctcaaagggatgtgggcgaaatcttgagtcttctgagaaaactgtacaagacactacgggaacagtttgcctccctcccagcctcaaccacaattcttccatgctggggctgatgtgggctagtaagactccagttcttagaggcgctgtagtatttttttttttttgtctcatcctttggatacttcttttaagtgggagtctcaggcaactcaagtttagacccttactctttttgtttgttttttgaaacaggatcttgctctgtcacccaggcttgagtgcagtggtgcgatcacagcccagtgcagcctcgaccacctgtgctcaagcaatcctcccatctccatctcccaaagtgctgggatgacaggcgtgagccacagctcccagcctaggcccttaatcttgctgttattttccatggactaaaggtctggtcatctgagctcacgctggctcacacagctctaggggcctgctcctctaactcacagtgggttttgtgaggctctgtggcccagagcagacctgcatatctgagcaaaaatagcaaaagcctctctcagcccactggcctgaatctacactggaagccaacttgctggcacccccgctccccaacccttcttgcctgggtaggagaggctaaagatcaccctaaatttactcatctctctagtgctgcctcacattgggcctcagcagctccccagcaccaattcacaggtcacccctctcttcttgcactgtccccaaacttgctgtcaattccgagatctaatctccccctacgctctgccaggaattctttcagacctcactagcacaagcccggttgctccttgtcaggagaatttgtagatcattctcacttcaaattcctggggctgatacttctctcatcttgcaccccaacctctgtaaatagatttaccgcatttacggctgcattctgtaagtgggcatggtctcctaatggaggagtgttcattgtataataagttattcacctgagtatgcaataaagatgtggtggccactctttcatggtggtggcagcaaaaaaaaaaaaaa

SEQ ID NO: 10 - DNA, 2456 bp, Homo sapiens
ataacagcatgaagtgccgtggaactggaataggcgtgtcctctccctcgaccctccccctccttgtccctctgctcacccctcgctcgttccctccctccggcgagggccgcctttataacaactgctcagagtgcgagggcgggatagctgtccaaggtctcccccagcactgaggagctcgcctgctgccctcttgcgcgcgggaagcagcaccaagttcacggccaacgccttggcactagggtccagaatggctacaacagtccctgatggttgccgcaatggcctgaaatccaagtactacagactttgtgataaggctgaagcttggggcatcgtcctagaaacggtggccacagccggggttgtgacctcggtggccttcatgctcactctcccgatcctcgtctgcaaggtgcaggactccaacaggcgaaaaatgctgcctactcagtttctcttcctcctgggtgtgttgggcatctttggcctcaccttcgccttcatcatcggactggacgggagcacagggcccacacgcttcttcctctttgggatcctcttttccatctgcttctcctgcctgctggctcatgctgtcagtctgaccaagctcgtccgggggaggaagcccctttccctgttggtgattctgggtctggccgtgggcttcagcctagtccaggatgttatcgctattgaatatattgtcctgaccatgaataggaccaacgtcaatgtcttttctgagctttccgctcctcgtcgcaatgaagactttgtcctcctgctcacctacgtcctcttcttgatggcgctgaccttcctcatgtcctccttcaccttctgtggttccttcacgggctggaagagacatggggcccacatctacctcacgatgctcctctccattgccatctgggtggcctggatcaccctgctcatgcttcctgactttgaccgcaggtgggatgacaccatcctcagctccgccttggctgccaatggctgggtgttcctgttggcttatgttagtcccgagttttggctgctcacaaagcaacgaaaccccatggattatcctgttgaggatgctttctgtaaacctcaactcgtgaagaagagctatggtgtggagaacagagcctactctcaagaggaaatcactcaaggttttgaagagacaggggacacgctctatgccccctattccacacattttcagctgcagaaccagcctccccaaaaggaattctccatcccacgggcccacgcttggccgagcccttacaaagactatgaagtaaagaaagagggcagctaactctgtcctgaagagtgggacaaatgcagccgggcggcagatctagcgggagctcaaagggatgtgggcgaaatcttgagtcttctgagaaaactgtacaagacactacgggaacagtttgcctccctcccagcctcaaccacaattcttccatgctggggctgatgtgggctagtaagactccagttcttagaggcgctgtagtatttttttttttttgtctcatcctttggatacttcttttaagtgggagtctcaggcaactcaagtttagacccttactctttttgtttgttttttgaaacaggatcttgctctgtcacccaggcttgagtgcagtggtgcgatcacagcccagtgcagcctcgaccacctgtgctcaagcaatcctcccatctccatctcccaaagtgctgggatgacaggcgtgagccacagctcccagcctaggcccttaatcttgctgttattttccatggactaaaggtctggtcatctgagctcacgctggctcacacagctctaggggcctgctcctctaactcacagtgggttttgtgaggctctgtggcccagagcagacctgcatatctgagcaaaaatagcaaaagcctctctcagcccactggcctgaatctacactggaagccaacttgctggcacccccgctccccaacccttcttgcctgggtaggagaggctaaagatcaccctaaatttactcatctctctagtgctgcctcacattgggcctcagcagctccccagcaccaattcacaggtcacccctctcttcttgcactgtccccaaacttgctgtcaattccgagatctaatctccccctacgctctgccaggaattctttcagacctcactagcacaagcccggttgctccttgtcaggagaatttgtagatcattctcacttcaaattcctggggctgatacttctctcatcttgcaccccaacctctgtaaatagatttaccgcatttacggctgcattctgtaagtgggcatggtctcctaatggaggagtgttcattgtataataagttattcacctgagtatgcaataaagatgtggtggccactctttcatggtggtggcagcaaaaaaaaaaaaaa

SEQ ID NO: 11 - DNA, 2446 bp, Homo sapiens
ataacagcatgaagtgccgtggaactggaataggcgtgtcctctccctcgaccctccccctccttgtccctctgctcacccctcgctcgttccctccctccggcgagggccgcctttataacaactgctcagagtgcgagggcgggatagctgtccaaggtctcccccagcactgaggagctcgcctgctgccctcttgcgcgcgggaagcagcaccaagttcacggccaacgccttggcactagggtccagaatggctacaacagtccctgatggttgccgcaatggcctgaaatccaagtactacagactttgtgataaggctgaagcttggggcatcgtcctagaaacggtggccacagccggggttgtgacctcggtggccttcatgctcactctcccgatcctcgtctgcaaggtgcaggactccaacaggcgaaaaatgctgcctactcagtttctcttcctcctgggtgtgttgggcatctttggcctcaccttcgccttcatcatcggactggacgggagcacagggcccacacgcttcttcctctttgggatcctcttttccatctgcttctcctgcctgctggctcatgctgtcagtctgaccaagctcgtccgggggaggaagcccctttccctgttggtgattctgggtctggccgtgggcttcagcctagtccaggatgttatcgctattgaatatattgtcctgaccatgaataggaccaacgtcaatgtcttttctgagctttccgctcctcgtcgcaatgaagactttgtcctcctgctcacctacgtcctcttcttgatggcgctgaccttcctcatgtcctccttcaccttctgtggttccttcacgggctggaagagacatggggcccacatctacctcacgatgctcctctccattgccatctgggtggcctggatcaccctgctcatgcttcctgactttgaccgcaggtgggatgacaccatcctcagctccgccttggctgccaatggctgggtgttcctgttggcttatgttagtcccgagttttggctgctcacaaagcaacgaaaccccatggattatcctgttgaggatgctttctgtaaacctcaactcgtgaagaagagctatggtgtggagaacagagcctactctcaagaggaaatcactcaaggttttgaagagacaggggacacgctctatgccccctattccacacattttcagctgcagaaccagcctccccaaaaggaattctccatcccacgggcccacgcttggccgagcccttacaaagactatgaagtaaagaaagagggcagctaactctgtcctgaagagtgggacaaatgcagccgggcggcagatctagcgggagctcaaagggatgtgggcgaaatcttgagtcttctgagaaaactgtacaagacactacgggaacagtttgcctccctcccagcctcaaccacaattcttccatgctggggctgatgtgggctagtaagactccagttcttagaggcgctgtagtatttttttttttttgtctcatccttaggatacttcttttaagtgggagtctcaggcaactcaagtttagacccttactctttttgtttgttttttgaaacaggatcttgctctgtcacccaggcttgagtgcagtggtgcgatcacagcccagtgcagcctcgaccacctgtgctcaagcaatcctcccatctccatctcccaaagtgctgggatgacaggcgtgagccacagctcccagcctaggcccttaatcttgctgttattttccatggactaaaggtctggtcatctgagctcacgctggctcacacagctctaggggcctgctcctctaactcacagtgggttttgtgaggctctgtggcccagagcagacctgcatatctgagcaaaaatagcaaaagcctctctcagcccactggcctgaatctacactggaagccaacttgctggcacccccgctccccaacccttcttgcctgggtaggagaggctaaagatcaccctaaatttactcatctctctagtgctgcctcacactgggcctcagcagctccccagcaccaattcacaggtcacccctctcttcttgcactgtccccaaacttgctgtcaattccgagatctaatctccccctacgctctgccaggaattctttcagacctcactagcacaagcccggttgctccttgtcaggagaatttgtagatcattctcacttcaaattcctggggctgatacttctctcatcttgcaccccaacctctgtaaatagatttaccgcatttacggctgcattctgtaagtgggcatggtctcctaatggaggagtgttcattgtataataagttattcacctgagtatgcaataaagatgtggtggccactctttcatggtggtggcagcagtt

SEQ ID NO: 12 - DNA, 2305 bp, Homo sapiens
ggcacgagggtctcccccagcactgaggagctcgcctgctgccctcttgcgcgcgggaagcagcaccaagttcacggccaacgccttggcactagggtccagaatggctacaacagtccctgatggttgccgcaatggcctgaaatccaagtactacagactttgtgataaggctgaagcttggggcatcgtcctagaaacggtggccacagctggggttgtgacctcggtggccttcatgctcactctcccgatcctcgtctgcaaggtgcaggactccaacaggcgaaaaatgctgcctactcagtttctcttcctcctgggtgtgttgggcatctttggcctcaccttcgccttcatcatcggactggacgggagcacagggcccacacgcttcttcctctttgggatcctcttttccatctgcttctcctgcctgctggctcatgctgtcagtctgaccaagctcgtccgggggaggaagcccctttccctgttggtgattctgggtctggccgtgggcttcagcctagtccaggatgttatcgctattgaatatattgtcctgaccatgaataggaccaacgtcaatgtcttttctgagctttccgctcctcgtcgcaatgaagactttgtcctcctgctcacctacgtcctcttcttgatggcgctgaccttcctcatgtcctccttcaccttctgtggttccttcacgggctggaagagacatggggcccacatctacctcacgatgctcctctccattgccatctgggtggcctggatcaccctgctcatgcttcctgactttgaccgcaggtgggatgacaccatcctcagctccgccttggctgccaatggctgggtgttcctgttggcttatgttagtcccgagttttggctgctcacaaagcaacgaaaccccatggattatcctgttgaggatgctttctgtaaacctcaactcgtgaagaagagctatggtgtggagaacagagcctactctcaagaggaaatcactcaaggttttgaagagacaggggacacgctctatgccccctattccacacattttcagctgcagaaccagcctccccaaaaggaattctccatcccacgggcccacgcttggccgagcccttacaaagactatgaagtaaagaaagagggcagctaactctgtcctgaagagtgggacaaatgcagccgggcggcagatctagcgggagctcaaagggatgtgggcgaaatcttgagtcttctgagaaaactgtacaagacactacgggaacagtttgcctccctcccagcctcaaccacaattcttccatgctggggctgatgtgggctagtaagactccagttcttagaggcgctgtagtattttttttttttttggctcatccttaggatacttcttttaagtgggagtctcaggcaactcaagtttagacccttactctttttgtttgttttttgaaacaggatcttgctctgtcacccaggcttgagtgcagtggtgcgatcacagcccagtgcagcctcgaccacctgtgctcaagcaatcctcccatctccatctcccaaagtgctgggatgacaggcgtgagccacagctcccagcctaggcccttaatcttgctgttattttccatggactaaaggtctggtcatctgagctcacgctggctcacacagctctaggggcctgctcctctaactcacagtgggttttgtgaggctctgtggcccagagcagacctgcatatctgagcaaaaatagcaaaagcctctctcagcccactggcctgaatctacactggaagccaacttgctggcacccccgctccccaacccttcttgcctgggtaggagaggctaaagatcaccctaaatttactcatctctctagtgctgcctcacattgggcctcagcagctccccagcaccaattcacaggtcacccctctcttcttgcactgtccccaaacttgctgtcaattccgagatctaatctccccctacgctctgccaggaattctttcagacctcactagcacaagcccggttgctccttgtcaggagaatttgtagatcattctcacttcaaattcctggggctgatacttctctcatcttgcaccccaacctctgtaaatagatttaccgcatttacggctgcattctgtaagtgggcatggtctcctaatggaggagtgttcattgtataataagttattcacctgagtatgcaataaagatgtggtggccactctttcatggtaaaaaaaaaaaaaaaaaaaaa

SEQ ID NO: 13 - DNA, 2297 bp, Homo sapiens
atagctgtccaaggtctcccccagcactgaggagctcgcctgctgccctcttgcgcgcgggaagcagcaccaagttcacggccaacgccttggcactagggtccagaatggctacaacagtccctgatggttgccgcaatggcctgaaatccaagtactacagactttgtgataaggctgaagcttggggcatcgtcctagaaacggtggccacagccggggttgtgacctcggtggccttcatgctcactctcccgatcctcgtctgcaaggtgcaggactccaacaggcgaaaaatgctgcctactcagtttctcttcctcctgggtgtgttgggcatctttggcctcaccttcgccttcatcatcggactggacgggagcacagggcccacacgcttcttcctctttgggatcctcttttccatctgcttctcctgcctgctggctcatgctgtcagtctgaccaagctcgtccgggggaggaagcccctttccctgttggtgattctgggtctggccgtgggcttcagcctagtccaggatgttatcgctattgaatatattgtcctgaccatgaataggaccaacgtcaatgtcttttctgagctttccgctcctcgtcgcaatgaagactttgtcctcctgctcacctacgtcctcttcttgatggcgctgaccttcctcatgtcctccttcaccttctgtggttccttcacgggctggaagagacatggggcccacatctacctcacgatgctcctctccattgccatctgggtggcctggatcaccctgctcatgcttcctgactttgaccgcaggtgggatgacaccatcctcagctccgccttggctgccaatggctgggtgttcctgttggcttatgttagtcccgagttttggctgctcacaaagcaacgaaaccccatggattatcctgttgaggatgctttctgtaaacctcaactcgtgaagaagggctatggtgtggagaacagagcctactctcaagaggaaatcactcaaggttttgaagagacaggggacacgctctatgccccctattccacacattttcagctgcagaaccagcctccccaaaaggaattctccatcccacgggcccacgcttggccgagcccttacaaagactatgaagtaaagaaagagggcagctaactctgtcctgaagagtgggacaaatgcagccgggcggcagatctagcgggagctcaaagggatgtgggcgaaatcttgagtcttctgagaaaactgtacaagacactacgggaacagtttgcctccctcccagcctcaaccacaattcttccatgctggggctgatgtgggctagtaagactccagttcttagaggcgctgtagtatttttttttttttgtctcatcctttggatacttcttttaagtgggagtctcaggcaactcaagtttagacccttactctttttgtttgttttttgaaacaggatcttgctctgtcacccaggcttgagtgcagtggtgcgatcacagcccagtgcagcctcgaccacctgtgctcaagcaatcctcccatctccatctcccaaagtgctgggatgacaggcgtgagccacagctcccagcctaggcccttaatcttgctgttattttccatggactaaaggtctggtcatctgagctcacgctggctcacacagctctaggggcctgctcctctaactcacagtgggttttgtgaggctctgtggcccagagcagacctgcatatctgagcaaaaatagcaaaagcctctctcagcccactggcctgaatctacactggaagccaacttgctggcacccccgctccccaacccttcttgcctgggtaggataggctaaagatcaccctaaatttactcatctctctagtgctgcctcacattgggcctcagcagctccccagcaccaattcacaggtcacccctctcttcttgcactgtccccaaacttgctgtcaattccgagatctaatctccccctacgctctgccaggaattctttcagacctcactagcacaagcccggttgctccttgtcaggagaatttgtagatcattctcacttcaaattcctggggctgatacttctctcatcttgcaccccaacctctgtaaatagatttaccgcatttacggctgcattctgtaagtgggcatggtctcctaatggaggagtgttcattgtataataagttattcacctgagtatgcaataaagatgtggtggccactcaaaaaaaaaaaaaaaaaaa

SEQ ID NO: 14 - DNA, 1170 bp, Homo sapiens
atggcgctgacccccgagtccccgagcagcttccctgggctggccgccaccggcagctctgtgccggagccgcctggcggccccaacgcaaccctcaacagctcctgggccagcccgaccgagcccagctccctggaggacctggtggccacgggcaccattgggactctgctgtcggccatgggcgtggtgggcgtggtgggcaacgcctacacgctggtggtcacctgccgctccctgcgtgcggtggcctccatgtacgtctacgtggtcaacctggcgctggccgacctgctgtacctgctcagcatccccttcatcgtggccacctacgtcaccaaggagtggcacttcggggacgtgggctgccgcgtgctcttcggcctggacttcctgaccatgcacgccagcatcttcacgctgaccgtcatgagcagcgagcgctacgctgcggtgctgcggccgctggacaccgtgcagcgccccaagggctaccgcaagctgctggcgctgggcacctggctgctggcgctgctgctgacgctgcccgtgatgctggccatgcggctggtgcgccggggtcccaagagcctgtgcctgcccgcctggggcccgcgcgcccaccgcgcctacctgacgctgctcttcgccaccagcatcgcggggcccgggctgctcatcgggctgctctacgcgcgcctggcccgcgcctaccgccgctcgcagcgcgcctccttcaagcgggcccggcggccgggggcgcgcgcgctgcgcctggtgctgggcatcgtgctgctcttctgggcctgcttcctgcccttctggctgtggcagctgctcgcccagtaccaccaggccccgctggcgccgcggacggcgcgcatcgtcaactacctgaccacctgcctcacctacggcaacagctgcgccaaccccttcctctacacgctgctcaccaggaactaccgcgaccacctgcgcggccgcgtgcggggcccgggcagcgggggaggccgggggcccgttccctccctgcagccccgcgcccgcttccagcgctgttcgggccgctccctgtcttcctgcagcccacagcccactgacagcctcgtgctggccccagcggccccggcccgacctgcgcccgagggtcccagggccccggcgtga

SEQ ID NO: 15 - DNA, 1107 bp, Homo sapiens
ggcacgaggggctggcggccggcgggagaggcggccggcctggactggcccgagagggatcccggttcccagaacagacctaggaggcggcctcgagggcggacggcagggagggccagcatgccccgactgctgcaccccgccctgccgctgctcctgggcgccacgctgaccttccgggcgctccggcgcgcgctctgtcgcctgcccctacccgtgcacgtgcgcgccgaccccctgcgcacctggcgctggcacaacctgctcgtctccttcgctcactccattgtgtcggggatctgggcactgctgtgtgtatggcagactcctgacatgttagtggagattgagacggcgtggtcactttctggctatttgctcgtttgcttctctgcggggtatttcatccacgatacggtggacatcgtggctagcggacagacgcgagcctcttgggaataccttgtccatcacgtcatggccatgggtgccttcttctccggcatcttttggagcagctttgtcggtgggggtgtcttaacactactggtggaagtcagcaacatcttcctcaccattcgcatgatgatgaaaatcagtaatgcccaggatcatctcctctaccgggttaacaagtatgtgaacctggtcatgtactttctcttccgcctggcccctcaggcctacctcacccatttcttcttgcgttatgtgaaccagaggaccctgggcaccttcctgctgggtatcctgctcatgctggacgtgatgatcataatctacttttcccgcctcctccgctctgacttctgccctgagcatgtccccaagaagcaacacaaagacaagttcttgactgagtgaggggcacagagcctgggacaacaaaaacggacaaggccagaaacagcttcatatggacactgggacttagccccaagcctgggtgtcctctgaggccagcctctccaccttctgagcctgcgcccacactattgaaaacactaatgaaagtaaaaaaaaaaaaaaaaaaaaaaaaaaaaaaaaaaaaaaaaaaaaaaaaaaaaaaaaaaaaaaaaaaaaaaaaaaaaaaaaaaaaaaaaaaaa

SEQ ID NO: 16 - DNA, 1107 bp, Homo sapiens; identical to SEQ ID NO: 15

SEQ ID NO: 17 - DNA, 2282 bp, Homo sapiens
gactccggggcgaccgccgcgagtccgcagtagttcgggccatggaggcggagccgccgctctacccgatggcgggggctgcggggccgcagggcgacgaggacctgctcggggtcccggacgggcccgaggccccgctggacgagctggtgggcgcgtaccccaactacaacgaggaggaggaggagcgccgctactaccgccgcaagcgcctgggcgtgctcaagaacgtgctggctgccagcgccgggggcatgctcacctacggcgtctacctgggcctcctgcagatgcagctgatcctgcactacgacgagacctaccgcgaggtgaagtatggcaacatggggctgcccgacatcgacagcaaaatgctgatgggcatcaacgtgactcccatcgccgccctgctctacacacctgtgctcatcaggttttttggaacgaagtggatgatgttcctcgctgtgggcatctacgccctctttgtctccaccaactactgggagcgctactacacgcttgtgccctcggctgtggccctgggcatggccatcgtgcctctttgggcttccatgggcaactacatcaccaggatggcgcagaagtaccatgagtactcccactacaaggagcaggatgggcaggggatgaagcagcggcctccgcggggctcccacgcgccctatctcctggtcttccaagccatcttctacagcttcttccatctgagcttcgcctgcgcccagctgcccatgatttatttcctgaaccactacctgtatgacctgaaccacacgctgtacaatgtgcagagctgcggcaccaacagccacgggatcctcagcggcttcaacaagacggttctgcggacgctcccgcggagcggaaacctcattgtggtggagagcgtgctcatggcagtggccttcctggccatgctgctggtgctgggtttgtgcggagccgcttaccggcccacggaggagatcgatctgcgcagcgtgggctggggcaacatcttccagctgcccttcaagcacgtgcgtgactaccgcctgcgccacctcgtgcctttctttatctacagcggcttcgaggtgctctttgcctgcactggtatcgccttgggctatggcgtgtgctcggtggggctggagcggctggcttacctcctcgtggcttacagcctgggcgcctcagccgcctcactcctgggcctgctgggcctgtggctgccacgcccggtgcccctggtggccggagcaggggtgcacctgctgctcaccttcatcctctttttctgggcccctgtgcctcgggtcctgcaacacagctggatcctctatgtggcagctgccctttggggtgtgggcagtgccctgaacaagactggactcagcacactcctgggaatcttgtacgaagacaaggagagacaggacttcatcttcaccatctaccactggtggcaggctgtggccatcttcaccgtgtacctgggctcgagcctgcacatgaaggctaagctggcggtgctgctggtgacgctggtggcggccgcggtctcctacctgcggattgagcagaagctgcggcggggcgtggccccgcgccagccccgcatcccgcggccccagcacaaggtgcgcggttaccgctacttggaggaggacaactcggacgagagcgacgcggagggcgagcatggggacggcgcggaggaggaggcgccgcccgcagggcccaggcctggccccgagcccgctggactcggccgccggccctgcccgtacgaacaggcgcaggggggagacgggccggaggagcagtgaggggccgcctggtccccggactcagcctccctcctcgccggcctcagtttaccacgtctgaggtcggggggaccccctccgagtcccgcgctgtcttcaaaggcccctgtctcccctccccgacgttggggacgcccctcccagagcccaggtcacctccgggcttccgcagccccctccaaggcggagtggagccttgggaacccctcggccaagcacaggggttcgaaaatacagctgaaaccccgcgggcccttagcacgcgccccagcgccggagcacggtcagggtcttcttgcgacccggcccgctccagatccccacagctttcggccgcggacccgggccgcgtgtgagcgcactttgcacctcctatccccagggtccgccgagagccacgattttttacagaaaatgagcaataaagagattttgtactgtcaaaaa

SEQ ID NO: 18 - DNA, 2128 bp, Homo sapiens
cgaggaggaggaggagcgccgctactaccgccgcaagcgcctgggcgtgctcaagaacgtgctggctgccagcgccgggggcatgctcacctacggcgtctacctgggcctcctgcagatgcagctgatcctgcactacgacgagacctaccgcgaggtgaagtatggcaacatggggctgcccgacatcgacagcaaaatgctgatgggcatcaacgtgactcccatcgccgccctgctctacacacctgtgctcatcaggttttttggaacgaagtggatgatgttcctcgctgtgggcatctacgccctctttgtctccaccaactactgggagcgctactacacgcttgtgccctcggctgtggccctgggcatggccatcgtgcctctttgggcttccatgggcaactacatcaccaggatggcgcagaagtaccatgagtactcccactacaaggagcaggatgggcaggggatgaagcagcggcctccgcggggctcccacgcgccctatctcctggtcttccaagccatcttctacagcttcttccatctgagcttcgcctgcgcccagctgcccatgatttatttcctgaaccactacctgtatgacctgaaccacacgctgtacaatgtgcagagctgcggcaccaacagccacgggatcctcagcggcttcaacaagacggttctgcggacgctcccgcggagcggaaacctcattgtggtggagagcgtgctcatggcagtggccttcctggccatgctgctggtgctgggtttgtgcggagccgcttaccggcccacggaggagatcgatctgcgcagcgtgggctggggcaacatcttccagctgcccttcaagcacgtgcgtgactaccgcctgcgccacctcgtgcctttctttatctacagcggcttcgaggtgctctttgcctgcactggtatcgccttgggctatggcgtgtgctcggtggggctggagcggctggcttacctcctcgtggcttacagcctgggcgcctcagccgcctcactcctgggcctgctgggcctgtggctgccacgcccggtgcccctggtggccggagcaggggtgcacctgctgctcaccttcatcctctttttctgggcccctgtgcctcgggtcctgcaacacagctggatcctctatgtggcagctgccctttggggtgtgggcagtgccctgaacaagactggactcagcacactcctgggaatcttgtacgaagacaaggagagacaggacttcatcttcaccatctaccactggtggcaggctgtggccatcttcaccgtgtacctgggctcgagcctgcacatgaaggctaagctggcggtgctgctggtgacgctggtggcggccgcggtctcctacctgcggatggagcagaagctgcggcggggcgtggccccgcgccagccccgcatcccgcggccccagcacaaggtgcgcggttaccgctacttggaggaggacaactcggacgagagcgacgcggagggcgagcatggggacggcgcggaggaggaggcgccgcccgcagggcccaggcctggccccgagcccgctggactcggccgccggccctgcccgtacgaacaggcgcaggggggagacgggccggaggagcagtgaggggccgcctggtccccggactcagcctccctcctcgccggcctcagtttaccacgtctgaggtcggggggaccccctccgagtcccgcgctgtcttcaaaggcccctgtctcccctccccgacgttggggacgcccctcccagagcccaggtcacctccgggcttccgcagccccctccaaggcggagtggagccttgggaacccctcggccaagcacaggggttcgaaaatacagctgaaaccccgcgggcccttagcacgcgccccagcgccggagcacggtcagggtcttcttgcgacccggcccgctccagatccccacagctctcggccgcggacccgggccgcgtgtgagcgcactttgcacctcctatccccagggtccgccgagagccacgattttttacagaaaatgagcaataaagagattttgtactgtcaaaaaaaaaaaaaaaaaaaaaaa

SEQ ID NO: 19 - DNA, 2282 bp, Homo sapiens; identical to SEQ ID NO: 17

SEQ ID NO: 20 - DNA, 1594 bp, Homo sapiens
gtcccggccgccgggaggaagtggccgggcggtcgcagggactccggggcgaccgccgcgagtccgcagtagttcgggccatggaggcggagccgccgctctacccgatggcgggggctgcggggccgcagggcgacgaggacctgctcggggtcccggacgggcccgaggccccgctggacgagctggtgggcgcgtaccccaactacaacgaggaggaggaggagcgccgctactaccgccgcaagcgcctgggcgtgctcaagaacgtgctggctgccagcgccgggggcatgctcacctacggcgtctacctgggcctcctgcagatgcagctgatcctgcactacgacgagacctaccgcgaggtgaagtatggcaacatggggctgcccgacatcgacagcaaaatgctgatgggcatcaacgtgactcccatcgccgccctgctctacacacctgtgctcatcaggttttttggaacgaagtggatgatgttcctcgctgtgggcatctacgccctctttgtctccaccaactactgggagcgctaccacacgcttgtgccctcggctgtggccctgggcatggccatcgtgcctctttgggcttccatgggcaactacatcaccaggatggcgcagaagtaccatgagtactcccactacaaggagcaggatgggcaggggatgaagcagcggcctccgcggggctcccacgcgccctatctcctggtcttccaagccatcttctacagcttcttccatctgagcttcgcctgcgcccagctgcccatgatttatttcctgaaccactacctgtatgacctgaaccacacgctgtacaatgtgcagagctgcggcaccaacagccacgggatcctcagcggcttcaacaagacggttctgcggacgctcccgcggagcggaaacctcattgtggtggagagcgtgctcatggcagtggccttcctggccatgctgctggtgctgggtttgtgcggagccgcttaccggcccacggaggagatcgatctgcgcagcgtgggctggggcaacatcttccagctgcccttcaagcacgtgcgtgactaccgcctgcgccacctcgtgcctttctttatctacagcggcttcgaggtgctctttgcctgcactggtatcgccttgggctatggcgtgtgctcggtggggctggagcggctggcttacctcctcgtggcttacagcctgggcgcctcagccgcctcactcctgggcctgctgggcctgtggctgccacgcccggtgcccctggtggccggagcaggggtgcacctgctgctcaccttcatcctctttttctgggcccctgtgcctcgggtcctgcaacacagctggatcctctatgtggcagctgccctttggggtgtgggcagtgccctgaacaagactggactcagcacactcctgggaatcttgtacgaagacaaggagagacaggacttcatcttcaccatctaccactggtggcaggctgtggccatcttcaccgtgtacctgggctcgagcctgcacatgaaggctaagctggcggtgctgctggtgacgctggt

SEQ ID NO: 21 - DNA, 996 bp, Homo sapiens
gtggaattcatggcatctacttcgtatgactattgcagagtgcccatggaagacggggataagcgctgtaagcttctgctggggataggaattctggtgctcctgatcatcgtgattctgggggtgcccttgattatcttcaccatcaaggccaacagcgaggcctgccgggacggccttcgggcagtgatggagtgtcgcaatgtcacccatctcctgcaacaagagctgaccgaggcccagaagggctttcaggatgtggaggcccaggccgccacctgcaaccacactgtgatggccctaatggcttccctggatgcagagaaggcccaaggacaaaagaaagtggaggagcttgagggagagatcactacattaaaccataagcttcaggacgcgtctgcagaggtggagcgactgagaagagaaaaccaggtcttaagcgtgagaatcgcggacaagaagtactaccccagctcccaggactccagctccgctgcggcgccccagctgctgattgtgctgctgggcctcagcgctctgctgcagtgagatcccaggaagctggcacatcttggaaggtccgtcctgctcggcttttcgcttgaacattcccttgatctcatcagttctgagcgggtcatggggcaacacggttagcggggagagcacggggtagccggagaagggcctctggagcaggtctggaggggccatggggcagtcctgggtgtggggacacagtcgggttgacccagggctgtctccctccagagcctccctccggacaatgagtcccccctcttgtctcccaccctgagattgggcatggggtgcggtgtggggggcatgtgctgcctgttgttatgggttttttttgcggggggggttgcttttttctggggtctttgagctccaaaaaataaacacttcctttgagggagagcaaaaaaaaaaaaaaaaaaaaaaaaaaaaaaaaaaaagaattccaccaca

SEQ ID NO: 22 - DNA, 983 bp, Homo sapiens
gtggaattcatggcatctacttcgtatgactattgcagagtgcccatggaagacggggataagcgctgtaagcttctgctggggataggaattctggtgctcctgatcatcgtgattctgggggtgcccttgattatcttcaccatcaaggccaacagcgaggcctgccgggacggccttcgggcagtgatggagtgtcgcaatgtcacccatctcctgcaacaagagctgaccgaggcccagaagggctttcaggatgtggaggcccaggccgccacctgcaaccacactgtgatggccctaatggcttccctggatgcagagaaggcccaaggacaaaagaaagtggaggagcttgagggagagatcactacattaaaccataagcttcaggacgcgtctgcagaggtggagcgactgagaagagaaaaccaggtcttaagcgtgagaatcgcggacaagaagtactaccccagctcccaggactccagctccgctgcggcgccccagctgctgattgtgctgctgggcctcagcgctctgctgcagtgagatcccaggaagctggcacatcttggaaggtccgtcctgctcggcttttcgcttgaacattcccttgatctcatcagttctgagcgggtcatggggcaacacggttagcggggagagcacggggtagccggagaagggcctctggagcaggtctggaggggccatggggcagtcctgggtgtggggacacagtcgggttgacccagggctgtctccctccagagcctccctccggacaatgagtcccccctcttgtctcccaccctgagattgggcatggggtgcggtgtggggggcatgtgctgcctgttgttatgggttttttttgcggggggggttgcttttttctggggtctttgagctccaaaaaataaacacttcctttgagggagagcaaaaaaaaaaaaaaaaaaaaaaaaaaaaaaaaaaaa

SEQ ID NO: 23 - DNA, 1103 bp, Homo sapiens
ataaaggggtggcccgtagaagattccagcaccctcccctaactccaggccagactcctttcagctaaaggggagatctggatggcatctacttcgtatgactattgcagagtgcccatggaagacggggataagcgctgtaagcttctgctggggataggaattctggtgctcctgatcatcgtgattctgggggtgcccttgattatcttcaccatcaaggccaacagcgaggcctgccgggacggccttcgggcagtgatggagtgtcgcaatgtcacccatctcctgcaacaagagctgaccgaggcccagaagggctttcaggatgtggaggcccaggccgccacctgcaaccacactgtgatggccctaatggcttccctggatgcagagaaggcccaaggacaaaagaaagtggaggagcttgagggagagatcactacattaaaccataagcttcaggacgcgtctgcagaggtggagcgactgagaagagaaaaccaggtcttaagcgtgagaatcgcggacaagaagtactaccccagctcccaggactccagctccgctgcggcgccccagctgctgattgtgctgctgggcctcagcgctctgctgcagtgagatcccaggaagctggcacatcttggaaggtccgtcctgctcggcttttcgcttgaacattcccttgatctcatcagttctgagcgggtcatggggcaacacggttagcggggagagcacggggtagccggagaagggcctctggagcaggtctggaggggccatggggcagtcctgggtgtggggacacagtcgggttgacccagggctgtctccctccagagcctccctccggacaatgagtcccccctcttgtctcccaccctgagattgggcatggggtgcggtgtggggggcatgtgctgcctgttgttatgggttttttttgcggggggggttgcttttttctggggtctttgagctccaaaaaataaacacttcctttgagggagaaaaaaaaaaaaaaaaaaaaaaaaaaaaaaaaaaaaaaaaaaaaaaaaaaaaaaaaaaaaaaaaaaaaaaaaaaaaaaaaaaaaaaa

SEQ ID NO: 24 - DNA, 11389 bp, Homo sapiens
atggcgccgccgccgccgcccgtgctgcccgtgctgctgctcctggccgccgccgccgccctgccggcgatggggctgcgagcggccgcctgggagccgcgcgtacccggcgggacccgcgccttcgccctccggcccggctgtacctacgcggtgggcgccgcttgcacgccccgggcgccgcgggagctgctggacgtgggccgcgatgggcggctggcaggacgtcggcgcgtctcgggcgcggggcgcccgctgccgctgcaagtccgcttggtggcccgcagtgccccgacggcgctgagccgccgcctgcgggcgcgcacgcaccttcccggctgcggagcccgtgcccggctctgcggaaccggtgcccggctctgcggggcgctctgcttccccgtccccggcggctgcgcggccgcgcagcattcggcgctcgcagctccgaccaccttacccgcctgccgctgcccgccgcgccccaggccccgctgtcccggccgtcccatctgcctgccgccgggcggctcggtccgcctgcgtctgctgtgcgccctgcggcgcgcggctggcgccgtccgggtgggactggcgctggaggccgccaccgcggggacgccctccgcgtcgccatccccatcgccgcccctgccgccgaacttgcccgaagcccgggcggggccggcgcgacgggcccggcggggcacgagcggcagagggagcctgaagtttccgatgcccaactaccaggtggcgttgtttgagaacgaaccggcgggcaccctcatcctccagctgcacgcgcactacaccatcgagggcgaggaggagcgcgtgagctattacatggaggggctgttcgacgagcgctcccggggctacttccgaatcgactctgccacgggcgccgtgagcacggacagcgtactggaccgcgagaccaaggagacgcacgtcctcagggtgaaagccgtggactacagtacgccgccgcgctcggccaccacctacatcactgtcttggtcaaagacaccaacgaccacagcccggtcttcgagcagtcggagtaccgcgagcgcgtgcgggagaacctggaggtgggctacgaggtgctgaccatccgcgccagcgaccgcgactcgcccatcaacgccaacttgcgttaccgcgtgttggggggcgcgtgggacgtcttccagctcaacgagagctctggcgtggtgagcacacgggcggtgctggaccgggaggaggcggccgagtaccagctcctggtggaggccaacgaccaggggcgcaatccgggcccgctcagtgccacggccaccgtgtacatcgaggtggaggacgagaacgacaactacccccagttcagcgagcagaactacgtggtccaggtgcccgaggacgtggggctcaacacggctgtgctgcgagtgcaggccacggaccgggaccagggccagaacgcggccattcactacagcatcctcagcgggaacgtggccggccagttctacctgcactcgctgagcgggatcctggatgtgatcaaccccttggatttcgaggatgtccagaaatactcgctgagcattaaggcccaggatgggggccggcccccgctcatcaattcttcaggggtggtgtctgtgcaggtgctggatgtcaacgacaacgagcctatctttgtgagcagccccttccaggccacggtgctggagaatgtgcccctgggctaccccgtggtgcacattcaggcggtggacgcggactctggagagaacgcccggctgcactatcgcctggtggacacggcctccacctttctggggggcggcagcgctgggcctaagaatcctgcccccacccctgacttccccttccagatccacaacagctccggttggatcacagtgtgtgccgagctggaccgcgaggaggtggagcactacagcttcggggtggaggcggtggaccacggctcgccccccatgagctcctccaccagcgtgtccatcacggtgctggacgtgaatgacaacgacccggtgttcacgcagcccacctacgagcttcgtctgaatgaggatgcggccgtggggagcagcgtgctgaccctgcaggcccgcgaccgtgacgccaacagtgtgattacctaccagctcacaggcggcaacacccggaaccgctttgcactcagcagccagagagggggcggcctcatcaccctggcgctacctctggactacaagcaggagcagcagtacgtgctggcggtgacagcatccgacggcacacggtcgcacactgcgcatgtcctaatcaacgtcactgatgccaacacccacaggcctgtctttcagagctcccattacacagtgagtgtcagtgaggacaggcctgtgggcacctccattgctaccctcagtgccaacgatgaggacacaggagagaatgcccgcatcacctacgtgattcaggaccccgtgccgcagttccgcattgaccccgacagtggcaccatgtacaccatgatggagctggactatgagaaccaggtcgcctacacgctgaccatcatggcccaggacaacggcatcccgcagaaatcagacaccaccaccctagagatcctcatcctcgatgccaatgacaatgcaccccagttcctgtgggatttctaccagggttccatctttgaggatgctccaccctcgaccagcatcctccaggtctctgccacggaccgggactcaggtcccaatgggcgtctgctgtacaccttccagggtggggacgacggcgatggggacttctacatcgagcccacgtccggtgtgattcgcacccagcgccggctggaccgggagaatgtggccgtgtacaacctttgggctctggctgtggatcggggcagtcccactccccttagcgcctcggtagaaatccaggtgaccatcttggacattaatgacaatgcccccatgtttgagaaggacgaactggagctgtttgttgaggagaacaacccagtggggtcggtggtggcaaagattcgtgctaacgaccctgatgaaggccctaatgcccagatcatgtatcagattgtggaaggggacatgcggcatttcttccagctggacctgctcaacggggacctgcgtgccatggtggagctggactttgaggtccggcgggagtatgtgctggtggtgcaggccacgtcggctccgctggtgagccgagccacggtgcacatccttctcgtggaccagaatgacaacccgcctgtgctgcccgacttccagatcctcttcaacaactatgtcaccaacaagtccaacagtttccccaccggcgtgatcggctgcatcccggcccatgaccccgacgtgtcagacagcctcaactacaccttcgtgcagggcaacgagctgcgcctgttgctgctggaccccgccacgggcgaactgcagctcagccgcgacctggacaacaaccggccgctggaggcgctcatggaggtgtctgtgtctgatggcatccacagcgtcacggccttctgcaccctgcgtgtcaccatcatcacggacgacatgctgaccaacagcatcactgtccgcctggagaacatgtcccaggagaagttcctgtccccgctgctggccctcttcgtggagggggtggccgccgtgctgtccaccaccaaggacgacgtcttcgtcttcaacgtccagaacgacaccgacgtcagctccaacatcctgaacgtgaccttctcggcgctgctgcctggcggcgtccgcggccagttcttcccgtcggaggacctgcaggagcagatctacctgaatcggacgctgctgaccaccatctccacgcagcgcgtgctgcccttcgacgacaacatctgcctgcgcgagccctgcgagaactacatgaagtgcgtgtccgttctgcgattcgacagctccgcgcccttcctcagctccaccaccgtgctcttccggcccatccaccccatcaacggcctgcgctgccgctgcccgcccggcttcaccggcgactactgcgagacggagatcgacctctgctactccgacccgtgcggcgccaacggccgctgccgcagccgcgagggcggctacacctgcgagtgcttcgaggacttcactggagagcactgtgaggtggatgcccgctcaggccgctgtgccaacggggtgtgcaagaacgggggcacctgcgtgaacctgctcatcggcggcttccactgcgtgtgtcctcctggcgagtatgagaggccctactgtgaggtgaccaccaggagcttcccgccccagtccttcgtcaccttccggggcctgagacagcgcttccacttcaccatctccctcacgtttgccactcaggaaaggaacggcttgcttctctacaacggccgcttcaatgagaagcacgacttcatcgccctggagatcgtggacgagcaggtgcagctcaccttctctgcaggcgagacaacaacgaccgtggcaccgaaggttcccagtggtgtgagtgacgggcggtggcactctgtgcaggtgcagtactacaacaagcccaatattggccacctgggcctgccccatgggccgtccggggaaaagatggccgtggtgacagtggatgattgtgacacaaccatggctgtgcgctttggaaaggacatcgggaactacagctgcgctgcccagggcactcagaccggctccaagaagtccctggatctgaccggccctctactcctggggggtgtccccaacctgccagaagacttcccagtgcacaaccggcagttcgtgggctgcatgcggaacctgtcagtcgacggcaaaaatgtggacatggccggattcatcgccaacaatggcacccgggaaggctgcgctgctcggaggaacttctgcgatgggaggcggtgtcagaatggaggcacctgtgtcaacaggtggaatatgtatctgtgtgagtgtccactccgattcggcgggaagaactgtgagcaagccatgcctcacccccagctcttcagcggtgagagcgtcgtgtcctggagtgacctgaacatcatcatctctgtgccctggtacctggggctcatgttccggacccggaaggaggacagcgttctgatggaggccaccagtggtgggcccaccagctttcgcctccagatcctgaacaactacctccagtttgaggtgtcccacggcccctccgatgtggagtccgtgatgctgtccgggttgcgggtgaccgacggggagtggcaccacctgctgatcgagctgaagaatgttaaggaggacagtgagatgaagcacctggtcaccatgaccttggactatgggatggaccagaacaaggcagatatcgggggcatgcttcccgggctgacggtaaggagcgtggtggtcggaggcgcctctgaagacaaggtctccgtgcgccgtggattccgaggctgcatgcagggagtgaggatgggggggacgcccaccaacgtcgccaccctgaacatgaacaacgcactcaaggtcagggtgaaggacggctgtgatgtggacgacccctgtacctcgagcccctgtccccccaatagccgctgccacgacgcctgggaggactacagctgcgtctgtgacaaagggtaccttggaataaactgtgtggatgcctgtcacctgaacccctgcgagaacatgggggcctgcgtgcgctcccccggctccccgcagggctacgtgtgcgagtgtgggcccagtcactacgggccgtactgtgagaacaaactcgaccttccgtgccccagaggctggtgggggaaccccgtctgtggaccctgccactgtgccgtcagcaaaggctttgatcccgactgtaataagaccaacggccagtgccaatgcaaggagaattactacaagctcctagcccaggacacctgtctgccctgcgactgcttcccccatggctcccacagccgcacttgcgacatggccaccgggcagtgtgcctgcaagcccggcgtcatcggccgccagtgcaaccgctgcgacaacccgtttgccgaggtcaccacgctcggctgtgaagtgatctacaatggctgtcccaaagcatttgaggccggcatctggtggccacagaccaagttcgggcagccggctgcggtgccatgccctaagggatccgttggaaatgcggtccgacactgcagcggggagaagggctggctgcccccagagctctttaactgtaccaccatctccttcgtggacctcagggccatgaatgagaagctgagccgcaatgagacgcaggtggacggcgccagggccctgcagctggtgagggcgctgcgcagtgctacacagcacacgggcacgctctttggcaatgacgtgcgcacggcctaccagctgctgggccacgtccttcagcacgagagctggcagcagggcttcgacctggcagccacgcaggacgccgactttcacgaggacgtcatccactcgggcagcgccctcctggccccagccaccagggcggcgtgggagcagatccagcggagcgagggcggcacggcacagctgctccggcgcctcgagggctacttcagcaacgtggcacgcaacgtgcggcggacgtacctgcggcccttcgtcatcgtcaccgccaacatgattcttgctgtcgacatctttgacaagttcaactttacgggagccagggtcccgcgattcgacaccatccatgaagagttccccagggagctggagtcctccgtctccttcccagccgacttcttcagaccacctgaagaaaaagaaggccccctgctgaggccggctggccggaggaccaccccgcagaccacgcgcccggggcctggcaccgagagggaggccccgatcagcaggcggaggcgacaccctgatgacgctggccagttcgccgtcgctctggtcatcatttaccgcaccctggggcagctcctgcccgagcgctacgaccccgaccgtcgcagcctccggttgcctcaccggcccatcattaataccccgatggtgagcacgctggtgtacagcgagggggctccgctcccgagacccctggagaggcccgtcctggtggagttcgccctgctggaggtggaggagcgaaccaagcctgtctgcgtgttctggaaccactccctggccgttggtgggacgggagggtggtctgcccggggctgcgagctcctgtccaggaaccggacacatgtcgcctgccagtgcagccacacagccagctttgcggtgctcatggatatctccaggcgtgagaacggggaggtcctgcctctgaagattgtcacctatgccgctgtgtccttgtcactggcagccctgctggtggccttcgtcctcctgagcctggtccgcatgctgcgctccaacctgcacagcattcacaagcacctcgccgtggcgctcttcctctctcagctggtgttcgtgattgggatcaaccagacggaaaacccgtttctgtgcacagtggttgccatcctcctccactacatctacatgagcacctttgcctggaccctcgtggagagcctgcatgtctaccgcatgctgaccgaggtgcgcaacatcgacacggggcccatgcggttctactacgtcgtgggctggggcatcccggccattgtcacaggactggcggtcggcctggacccccagggctacgggaaccccgacttctgctggctgtcgcttcaagacaccctgatttggagctttgcggggcccatcggagctgttataatcatcaacacagtcacttctgtcctatctgcaaaggtttcctgccaaagaaagcaccattattatgggaaaaaagggatcgtctccctgctgaggaccgcattcctcctgctgctgctcatcagcgccacctggctgctggggctgctggctgtgaaccgcgatgcactgagctttcactacctcttcgccatcttcagcggcttacagggccccttcgtcctccttttccactgcgtgctcaaccaggaggtccggaagcacctgaagggcgtgctcggcgggaggaagctgcacctggaggactccgccaccaccagggccaccctgctgacgcgctccctcaactgcaacaccaccttcggtgacgggcctgacatgctgcgcacagacttgggcgagtccaccgcctcgctggacagcatcgtcagggatgaagggatccagaagctcggcgtgtcctctgggctggtgaggggcagccacggagagccagacgcgtccctcatgcccaggagctgcaaggatccccctggccacgattccgactcagatagcgagctgtccctggatgagcagagcagctcttacgcctcctcacactcgtcagacagcgaggacgatggggtgggagctgaggaaaaatgggacccggccaggggcgccgtccacagcacccccaaaggggacgctgtggccaaccacgttccggccggctggcccgaccagagcctggctgagagtgacagtgaggaccccagcggcaagccccgcctgaaggtggagaccaaggtcagcgtggagctgcaccgcgaggagcagggcagtcaccgtggagagtaccccccggaccaggagagcgggggcgcagccaggcttgctagcagccagcccccagagcagaggaaaggcatcttgaaaaataaagtcacctacccgccgccgctgacgctgacggagcagacgctgaagggccggctccgggagaagctggccgactgtgagcagagccccacatcctcgcgcacgtcttccctgggctctggcggccccgactgcgccatcacagtcaagagccctgggagggagccggggcgtgaccacctcaacggggtggccatgaatgtgcgcactgggagcgcccaggccgatggctccgactctgagaaaccgtgaggcaagcccgtcaccccacacaggctgcggcatcaccctcagaccttggagcccaaggggccactgcccttgaagtggagtgggcccagagtgtggcggtccccatggtggcagccccccgactgatcatccagacacaaaggtcttggttctcccaggagctcagggcctgtcagacctggtgacaagtgccaaaggccacaggcatgagggaggcgtggaccactgggccagcaccgctgagtcctaagactgcagtcaaagccagaactgagaggggaccccagactgggcccagaggctggccagagttcaggaacgccgggcacagaccaaagaccgcggtccagccccgcccaggcgggcatctcatggcagtgcggacccgtggctggcagcccgggcagtcctttgcaaaggcaccccttgtcttaaaatcacttcgctatgtgggaaaggtggagatacttttatatatttgtatgggactctgaggaggtgcaacctgtatatatattgcattcgtgctgactttgttatcccgagagatccatgcaatgatctcttgctgtcttctctgtcaagattgcacagttgtacttgaatctggcatgtgttgacgaaactggtgccccagcagatcaaaggtgggaaatacgtcagcagtggggctaaaaccaagcggctagaagccctacagctgccttcggccaggaagtgaggatggtgtgggccctccccgccggccccctgggtccccagtgttcgctgtgtgtgcgtttgtcctctgctgccatctgccccggctgtgtgaattcaagacagggcagtgcagcactaggcaggtgtgaggagccctgctgaggtcactgtggggcacggttgccacacggctgtcatttttcacctggtcattctgtgaccaccaccccctcccctcaccgcctcccaggtggcccgggagctgcaggtggggatggctttgtcctttgctcctgctccccgtgggacctgggaccttaaagcgttgcaggttcctgatttggacagaggtgtggggccttccaggccgttacatacctcctgccaattctctaactctctgagactgcgaggatctccaggcagggttctcccctctggagtctgaccaattacttcattttgcttcaaatggccaattgtgcagagggacaaagccacagccacactcttcaacggttaccaaactgtttttggaaattcacaccaaggtcgggcccactgcaggcagctggcacagcgtggcccgaggggctgtggaacgggtcccggaactgtcagacatgtttgattttagcgtttcctttgttcttcaaatcaggtgcccaaataagtgatcagcacagctgcttccaaataggagaaaccataaaataggatgaaaatcaagtaaaatgcaaagatgtccacactgttttaaacttgaccctgatgaaaatgtgagcactgttagcagatgcctatgggagaggaaaagcgtatctgaaaatggtccaggacaggaggatgaaatgagatcccagagtcctcacacctgaatgaattatacatgtgccttaccaggtgagtggtctttcgaagataaaaaactctagtccctttaaacgtttgcccctggcgtttcctaagtacgaaaaggtttttaagtcttcgaacagtctcctttcatgactttaacaggattctgccccctgaggtgtaatttttttgttctatttttttccacgtactccacagccaacatcacgaggtgtaatttttaatttgatcagaactgttaccaaaaaacaactgtcagttttattgagatgggaaaaatgtaaacctatttttattacttaagactttatgggagagattagacactggaggtttttaacagaacgtgtatttattaatgttcaaaacactggaattacaaatgagaagagtctacaataaattaagatttttgaatttgtacttctgcggtgctggtttttctccacaaacacccccgcccctccccatgcccagggtggccgtggaagggacggtttacggacgtgcagctgagctgtccgtgtcccatgctccctcagccagtggaacgtgccggaactttttgtccattccctagtaggcctgccacagcctagatgggcagtttttgtctttcaccaaatttgaggactttttttttttgccattatttcttcagttttcttttcttgcactgatctttctcctctccttctgtgactccagtgactcagacgttagacctcttgatgttttcccactggtccctgaggctctgttc

SEQ ID NO: 25 - DNA, 11389 bp, Homo sapiens; identical to SEQ ID NO: 24

SEQ ID NO: 26 - DNA, 2488 bp, Homo sapiens
ggcacgaggctgacttccccttccagatccacaacagctccggttggatcacagtgtgtgccgagctggaccgcgaggaggtggatcactacagcttcggggtggaggcggtggaccacggctggccccccatgagctcctccaccagcgtgtccatcacggtgctggacgtgaatgacaacgacccggtgttcacgcagcccacctacgagcttcgtctgaatgaggatgcggccgtggggagcagcgtgctgaccctgcaggcccgcgaccgtgacgccaacagtgtgattacctaccagctcacaggcggcaacacccggaaccgctttgcactcagcagccagagagggggcggcctcatcaccctggcgctacctctggactacaagcaggagcagcagtacgtgctggcggtgacagcatccgacggcacacggtcgcacactgcgcatgtcctaatcaacgtcactgatgccaacacccacaggcctgtctttcagagctcccattacacagtgagtgtcagtgaggacaggcctgtgggcacctccattgctaccctcagtgccaacgatgaggacacaggagagaatgcccgcatcacctacgtgattcaggaccccgtgccgcagttccgcattgaccccgacagtggcaccatgtacaccatgatggagctggactatgagaaccaggtcgcctacacgctgaccatcatggcccaggacaacggcatcccgcagaaatcagacaccaccaccctagagatcctcatcctcgatgccaatgacaatgcaccccagttcctgtgggatttctaccagggttccatctttgaggatgctccaccctcgaccagcatcctccaggtctctgccacggaccgggactcaggtcccaatgggcgtctgctgtacaccttccagggtggggacgacggcgatggggacttctacatcgagcccacgtccggtgtgattcgcacccagcgccggctggaccgggagaatgtggccgtgtacaacctttgggctctggctgtggatcggggcagtcccactccccttagcgcctcggtagaaatccaggtgaccatcttggacattaatgacaatgcccccatgtttgagaaggacgaactggagctgtttgttgaggagaacaacccagtggggtcggtggtggcaaagattcgtgctaacgaccctgatgaaggccctaatgcccagatcatgtatcagattgtggaaggggacatgcggcatttcttccagctggacctgctcaacggggacctgcgtgccatggtggagctggactttgaggtccggcgggagtatgtgctggtggtgcaggccacgtcggctccgctggtgagccgagccacggtgcacatccttctcgtggaccagaatgacaacccgcctgtgctgcccgacttccagatcctcttcaacaactatgtcaccaacaagtccaacagtttccccaccggcgtgatcggccgcatcccggcccatgaccccgacgtgtcagacagcctcaactacaccttcgtgcagggcaacgagctgcgcctgttgctgctggaccccgccacgggcgaactgcagctcagccgcgacctggacaacaaccggccgctggaggcgctcatggaggtgtctgtgtctgatggcatccacagcgtcacggccttctgcaccctgcgtgtcaccatcatcacggacgacatgctgaccaacagcatcactgtccgcctggagaacatgtcccaggagaagttcctgtccccgctgctggccctcttcgtggagggggtggccgccgtgctgtccaccaccaaggacgacgtcttcgtcttcaacgtccagaacgacaccgacgtcagctccaacatcctgaacgtgaccttctcggcgctgctgcctggcggcgtccgcggccagttcttcccgtcggaggacctgcaggagcagatctacctgaatcggacgctgctgaccaccatctccacgcagcgcgtgctgcccttcgacgacaacatctgcctgcgcgagccctgcgagaactacatgaagtgcgtgtccgttctgcgattcgacagctccgcgcccttcctcagctccaccaccgtgctcttccggcccatccaccccatcaacggcctgcgctgccgctgcccgcccggcttcaccggcgactactgcgagacggagatcgacctctgctactccgacccgtgcggcgccaacggccgctgccgcagccgcgagggcggctacacctgcgagtgcttcgaggacttcactgaaatttcgtgactcatcctcccgcctctgaagatgctctttccttgatacctcctgactcatcaccaagatgaattactccaaatgtagccaacggtggtttttaaaaataaagagccaccccgagagtggtacagaaaaaaaaaaaaaaaaaaaaaaaaaaaaaaaaaaaa

SEQ ID NO: 27 - DNA, 3506 bp, Homo sapiens
gccacgattccgactcagatagcgagctgtccctggatgagcagagcagctcttacgcctcctcacactcgtcagacagcgaggacgatggggtgggagctgaggaaaaatgggacccggccaggggcgccgtccacagcacccccaaaggggacgctgtggccaaccacgttccggccggctggcccgaccagagcctggctgagagtgacagtgaggaccccagcggcaagccccgcctgaaggtggagaccaaggtcagcgtggagctgcaccgcgaggagcagggcagtcaccgtggagagtaccccccggaccaggagagcgggggcgcagccaggcttgctagcagccagcccccagagcagaggaaaggcatcttgaaaaataaagtcacctacccgccgccgctgacgctgacggagcagacgctgaagggccggctccgggagaagctggccgactgtgagcagagccccacatcctcgcgcacgtcttccctgggctctggcggccccgactgcgccatcacagtcaagagccctgggagggagccggggcgtgaccacctcaacggggtggccatgaatgtgcgcactgggagcgcccaggccgatggctccgactctgagtgagtagcctgggcctccagggcggggatcacccacttcccccttgtcctgagtcaggagagagagggggcagtggtcagggacctgacacccacctcacctggagccctgagtgcagaggaagcccaggcggggatgggggaggggggaggcgctgcagctgaggtcaggaggataccccggagatgggcagaccccctatcctggggacacgtctcaggcctctgggactctgaagccctggccagccccaaaatgctaggacctaaggtgctgggctctgcgtttgatcagcattgtctccgcctgggaccactgccacccaccttgcagttgaggatactgagggtcccggaatgccaggggtgaagggggcggggtggagctggggtcctggccccagacctctccctgtcgcccctccctccctccaaactcacaagggagaagccaggtcttcagaatgccccttccaaaagtcactgtagagatggccggtttctaacgtggattccttgcgctcttctgaaagaccagcaacacagaggcccacaggctggtcctggtcccctctcctgcctcccaagggcagcctcatccaacatgagcttgccctccctggagcccccagacgccccctctaccctgatggggtgatcctgcccccccgtgtgacaaccttgggccccaccaagccgctaccctcactgacccttcacctgcttgctggcttcttcccacgcgcagaggcagtaatgaaacttcaatttgaaccatcagtaatgaaacttcaatttgaaccatcaggaaaccgtgaggcaagcccgtcaccccacacaggctgcggcatcaccctcagaccttggagcccaaggggccactgcccttgaagtggagtgggcccagagtgtggcggtccccatggtggcagccccccgactgatcatccagacacaaaggtcttggttctcccaggagctcagggcctgtcagacctggtgacaagtgccaaaggccacaggcatgagggaggcgtggaccactgggccagcaccgctgagtcctaagactgcagtcaaagccagaactgagaggggaccccagactgggcccagaggctggccagagttcaggaacgccgggcacagaccaaagaccgcggtccagccccgcccaggcgggcatctcatggcagtgcggacccgtggctggcagcccgggcagtcctttgcaaaggcaccccttgtcttaaaatcacttcgctatgtgggaaaggtggagatacttttatatatttgtatgggactctgaggaggtgcaacctgtatatatattgcattcgtgctgactttgttatcccgagagatccatgcaatgatctcttgctgtcttctctgtcaagattgcacagttgtacttgaatctggcatgtgttgacgaaactggtgccccagcagatcaaaggtgggaaatacgtcagcagtggggctaaaaccaagcggctagaagccctacagctgccttcggccaggaagtgaggatggtgtgggccctccccgccggccccctgggtccccagtgttcgctgtgtgtgcgtttgtcctctgctgccatctgccccggctgtgtgaattcaagacagggcagtgcagcactaggcaggtgtgaggagccctgctgaggtcactgtggggcacggttgccacacggctgtcatttttcacctggtcattctgtgaccaccaccccctcccctcaccgcctcccaggtggcccgggagctgcaggtggggatggctttgtcctttgctcctgctccccgtgggacctgggaccttaaagcgttgcaggttcctgatttggacagaggtgtggggccttccaggccgttacatacctcctgccaattctctaactctctgagactgcgaggatctccaggcagggttctcccctctggagtctgaccaattacttcattttgcttcaaatggccaattgtgcagagggacaaagccacagccacactcttcaacggttaccaaactgtttttggaaattcacaccaaggtcgggcccactgcaggcagctggcacagcgtggcccgaggggctgtggaacgggtcccggaactgtcagacatgtttgattttagcgtttcctttgttcttcaaatcaggtgcccaaataagtgatcagcacagctgcttccaaataggagaaaccataaaataggatgaaaatcaagtaaaatgcaaagatgtccacactgttttaaacttgaccctgatgaaaatgtgagcactgttagcagatgcctatgggagaggaaaagcgtatctgaaaatggtccaggacaggaggatgaaatgagatcccagagtcctcacacctgaatgaattatacatgtgccttaccaggtgagtggtctttcgaagataaaaaactctagtccctttaaacgtttgcccctggcgtttcctaagtacgaaaaggtttttaagtcttcgaacagtctcctttcatgactttaacaggattctgccccctgaggtgtaatttttttgttctatttttttccacgtactccacagccaacatcacgaggtgtaatttttaatttgatcagaactgttaccaaaaaacaactgtcagttttattgagatgggaaaaatgtaaacctatttttattacttaagactttatgggagagattagacactggaggtttttaacagaacgtgtatttattaatgttcaaaacactggaattacaaatgagaagagtctacaataaattaagatttttgaatttgtaaaaaaaaaaaaaaaaaaaaaaaaaaaaaaaaaaaaaaaaaaaaaaaaaaaaaa

SEQ ID NO: 28 - DNA, 1127 bp, Homo sapiens
tcctggagcccaggctcttttccacagaggaggaaagagcaggcagcagagaccatggggcccccctcagcctctccccacagagaatgcatcccctggcaggggcttctgctcacagcctcacttctaaacttctggaacccgcccaccactgccaagctcactattgaatccatgccgctcagtgtcgcagaggggaaggaggtgcttctacttgtccacaatctgccccagcatctttttggctacagctggtacaaaggggaaagagtggatggcaacagtctaattgtgggatatgtaataggaactcaacaagctaccccaggggccgcatacagcggtcgagagacaatatacaccaatgcatccctgctgatccagaatgtcacccagaatgacataggattctacaccctacaagtcataaagtcagatcttgtgaatgaagaagcaactggacagttccatgtataccaagaaaatgccccaggccttcctgtgggggccgtcgccggcatcgtgaccggggtcctggtcggagtggcgctggtggccgcgctggtgtgtttcctgctccttgccaaaactggaagaaccagcatccagcgtgacctcaaggagcagcagccccaagcccttgcccctggccgtggtccctcccacagctctgccttctcgatgtcccctctctcctctgcccaggcccccctacccaaccccaggacagcagcttccatctatgaggaattgctaaaacatgacacaaacatttactgccggatggaccacaaagcagaagtggcttcttagcttcctccaggagctgctcctgtgtgttgatggagagtccccaaggcccccagccctggggatggggaaggacatgaagcctgagccagagaaccagctataagtcctgagaagacactggtgtctggggacagggagggatggggtccctgatgaatatctggagacctcgacagcctgccctaggccctgggtgggtcaggacaaaggcctctcatcaccgcagaaagcgggggcttgcagggaaagtgaatgggcctgtggcccacctggggtcacttggaaaggatctgaataaaggggacccttcctcg

SEQ ID NO: 29 - DNA, 1022 bp, Homo sapiens
tcctggagcccaggctcttttccacagaggaggaaagagcaggcagcagagaccatggggcccccctcagcccctccccacagagaatgcatcccctggcaggggcttctgctcacagcctcacttctaaacttctggaacccgcccaccactgccaagctcactattgaatccatgccgctcagtgtcgcagaggggaaggaggtgcttctacttgtccacaatctgccccagcatctttttggctacagctggtacaaaggggaaagagtggatggcaacagtctaattgtgggatatgtaataggaactcaacaagctaccccaggggccgcatacagcggtcgagagacaatatacaccaatgcatccctgctgatccagaatgtcacccagaatgacataggattctacaccctacaagtcataaagtcagatcttgtgaatgaagaagcaactggacagttccatgtataccaagaaaatgccccaggccttcctgtgggggccgtcgccggcatcgtgaccggggtcctggtcggagtggcgctggtggccgcgctggtgtgtttcctgctccttgccaaaactggaaggccgtggtccctcccacagctctgccttctcgatgtcccctctctccactgcctaggcccccctacccaaccccaggacagcagcttccatctatgagaagtggcttcttagcttcctccaggagctgctcctgtgggttgatggagagtccccaaggcccccagccctggggatggggaaggacatgaagcctgagccagagaaccagctataagtcctgagaagacactggtgtctggggacagggagggatggggtccctgatgaatatctggagacctcgacagcctgccctaggccctgggtgggtcaggacaaaggcctctcatcaccgcagaaagcgggggcttgcagggaaagtgaatgggcctgtggcccacctggggtcacttggaaaggatctgaataaaggggacccttcctcg

SEQ ID NO: 30 - DNA, 1149 bp, Homo sapiens
gaattccctgactacagcattcctggagcccaggctcttttccacagaggaggaaagagcaggcagcagagaccatggggcccccctcagcctctccccacagagaatgcatcccctggcaggggcttctgctcacagcctcacttctaaacttctggaacccgcccaccactgccaagctcactattgaatccatgccgctcagtgtcgcagaggggaacgaggtgcttctacttgtccacaatctgccccagcatctttttggctacagctggtacaaaggggaaagagtggatggcaacagtctaattgtaggatatgtaataggaactcaacaagctaccccaggggccgcatacagcggtcgagagacaatatacaccaatgcatccctgctgatccagaatgtcacccagaatgacataggattctacaccctacaagtcataaagtcagatcttgtgaatgaagaagcaactggacagttccatgtataccaagaaaatgccccaggccttcctgtgggggccgtcgccggcatcgtgaccggggtcctggtcggagtggcgctggtggccgcactggtgtgtttcctgctccttgccaaaactggaagaaccagcatccagcgtgacctcaaggagcagcagccccaagcccttgcccctggccgtggtccctcccacagctctgccttctcgatgtcccctctctccactgcccaggcccccctacccaaccccaggacagcagcttccatctatgaggaattgctaaaacatgacacaaacatttactgccggatggaccacaaagcagaagtggcttcttagcttccgccaggagctgctcctgtgggttgatggagagtccccaaggcccccagccctggggatggggaaggacatgaagcctgagccagagaaccagctataagtcctgagaagacactggtgtctggggacagggagggatgggggtccctgatgaatatgtggagacctcgacagcctgccctaggccctgggtgggtcaggacaaaggcctctcatcaccgcagaaagcgggggcttgcagggaaagtgaatgggcctgtggcccacctggggtcacttggaaaggatctgaataaaggggacccttcctctc

SEQ ID NO: 31 - DNA, 1640 bp, Homo sapiens
acagcattcctggagcccaggctcttttccacagaggaggaaagagcaggcagcagagaccatggggcccccctcagcctctccccacagagaatgcatcccctggcaggggcttctgctcacagcctcacttctaaacttctggaacccgcccaccactgccaagctcactattgaatccatgccgctcagtgtcgcagaggggaaggaggtgcttctacttgtccacaatctgccccagcatctttttggctacagctggtacaaaggggaaagagtggatggcaacagtctaattgtaggatatgtaacaggaactcaacaagctaccccaggggccgcatacagcggtcgagagacaatatacaccaatgcatccctgctgatccagaatgtcacccagaatgacataggattctacaccctacaagtcataaagtcagatcttgtgaatgaagaagcaactggacacttccatgtatacccggagctgcccaagccctccatctccagcaacaactccaaccccaaggaggacaaggatgctgtggccttcacctgtgaacctgagattcacagcacaacctgcctgtagtgggtaaatggtcagagcctcccggtcagttccaggctgcagctgtccaatgacaagaggaccctcactctactcagtgtcacaaggaatgacacaggaccctatgagtgtgaaataccgaacccagtgggtgccagctacagtgacccagtcacgctgaatgtcctctgtatcttctgttcctctgtggcccaggcttccagcccaaatccacacagccagaggccaggcctctcagtccctctcaagtccagggactcagactctcacccaggctggccatcacttcctgtcccaagcaaacctgggcagacccagccttgaccaagaataggaggggagaggctgctcctgtcctgggaggctcagggtccacagcctgtgatgggagaaacagaaaatgccccaggccttcctgtgggggccgtcgccggcatcgtgaccggggtcctggtcggagtggcgctggtggccgcgctggtgtgtttcctgctccttgccaaaactggaagaaccagcatccagcgtgacctcaaggagcagcagccccaagcccttgcccctggccgtggtccctcccacagctctgccttctcgatgtcccctctctccactgcccaggcccccctacccaaccccaggacagcagcttccatctatgaggaattgctaaaacatgacacaaacatttacagccggatggaccacaaagcagaagtggcttcttagcttcctccaggagctgctcctgtgtgttgatggagagtccccaaggcccccagccctggggatggggaaggacatgaagcctgagccagagaaccagctataagtcctgagaagacactggtgtctgggggcagggagggatgggggtccctgatgaatatctggagacctcgacagcctgccctaggccctgggtgggtcaggacaaaggcctctcatcaccgcagaaagcgggggcttgcagggaaagtgaatgggcctgtggcccacctggggtcacttggaaaggatctgaataaaggggacccttcctctc

SEQ ID NO: 32 - DNA, 1022 bp, Homo sapiens; identical to SEQ ID NO: 29

SEQ ID NO: 33 - DNA, 2527 bp, Homo sapiens
ctcaagctcctctacaaagaggtggacagagaagacagcagagaccatgggacccccctcagcccctccctgcagattgcatgtcccctggaaggaggtcctgctcacagcctcacttctaaccttctggaacccacccaccactgccaagctcactattgaatccacgccattcaatgtcgcagaggggaaggaggttcttctactcgcccacaacctgccccagaatcgtattggttacagctggtacaaaggcgaaagagtggatggcaacagtctaattgtaggatatgtaataggaactcaacaagctaccccagggcccgcatacagtggtcgagagacaatataccccaatgcatccctgctgatccagaacgtcacccagaatgacacaggattctataccctacaagtcataaagtcagatcttgtgaatgaagaagcaaccggacagttccatgtatacccggagctgcccaagccctccatctccagcaacaactccaaccccgtggaggacaaggatgctgtggccttcacctgtgaacctgaggttcagaacacaacctacctgtggtgggtaaatggtcagagcctcccggtcagtcccaggctgcagctgtccaatggcaacatgaccctcactctactcagcgtcaaaaggaacgatgcaggatcctatgaatgtgaaatacagaacccagcgagtgccaaccgcagtgacccagtcaccctgaatgtcctctatggcccagatggccccaccatttccccctcaaaggccaattaccgtccaggggaaaatctgaacctctcctgccacgcagcctctaacccacctgcacagtactcttggtttatcaatgggacgttccagcaatccacacaagagctctttatccccaacatcactgtgaataatagcggatcctatatgtgccaagcccataactcagccactggcctcaataggaccacagtcacgatgatcacagtctctggaagtgctcctgtcctctcagctgtggccaccgtcggcatcacgattggagtgctggccagggtcgctctgatatagcagccctggtgtattttcgatatttcaggaagactggcagattggaccagaccctgaattcttctagctcctccaatcccattttatccatggaaccactaaaaacaaggtctgctctgctcctgaagccctatatgctggagatggacaactcaatgaaaatttaaagggaaaaccctcaggcctgaggtgtgtgccactcagagacttcacctaactagagacaggcaaactgcaaaccatggtgagaaattgacgacttcacactatggacagcttttcccaagatgtcaaaacaagactcctcatcatgataaggctcttacccccttttaatttgtccttgcttatgcctgcctctttcgcttggcaggatgatgctgtcattagtattcacaagaagtagcttcagagggtaacttaacagagtatcagattctatcttgtcaatcccaacgttttacataaaataagagatcctttagtgcacccagtgactgacattagcagcatctttaacacagccgtgtgttcaaatgtacagtggtccttttcagagttggacttctagactcacctgttctcactccctgttttaatttcaacccagccatgcaatgccaaataatagaattgctccctaccagctgaacagggaggagtctgtgcagtttctgacacttgttgttgaacatggctaaatacaatgggtatcgctgagactaagttgtagaaattaacaaatgtgctgctggtaaaatggctacactcatctgactcattctttattctattttagttggtttgtatcttgcctaaggtgcgtagtccaactcttggtattaccctcctaatagtcatactagtagtcatactccctggtgtagtgtattctctaaaagctttaaatgtctgcatgcagccagccatcaaatagtgaatggtctctctttggctggaattacaaaactcagagaaatgtgtcatcaggagaacatcataacccatgaaggataaaagccccaaatggtggtaactgataatagcactaatgcttaagatttggtcacactctctcacctaggtgagcgcattgagccagtggtgctaaatgctacatactccaactgaaatgttaaggaagaagatagatccaattaaaaaaaattaaaaccaatttaaaaaaaaaaagaacacaggagattccagtctacttgagttagcataatacagaagtcccctctactttaacttttacaaaaaagtaacctgaactaatctgatgttaaccaatgtatttatttctgtggttctgtttccttgttccaatttgacaaaacccactgttcttgtattgtattgccaggggggagctatcactgtacttgtagagtggtgctgctttaattcataaatcacaaataaaagccaattagctctataact

SEQ ID NO: 34 - DNA, 2249 bp, Homo sapiens
ctcctctacaaagaggtggacagagaagacagcagagaccatgggacccccctcagcccctccctgcagattgcatgtcccctggaaggaggtcctgctcacagcctcacttctaaccttctggaacccacccaccactgccaagctcactattgaatccacgccattcaatgtcgcagaggggaaggaggttcttctactcgcccacaacctgccccagaatcgtattggttacagctggtacaaaggcgaaagagtggatggcaacagtctaattgtaggatatgtaataggaactcaacaagctaccccagggcccgcatacagtggtcgagagacaatataccccaatgcatccctgctgatccagaacgtcacccagaatgacacaggattctataccctacaagtcataaagtcagatcttgtgaatgaagaagcaaccggacagttccatgtatacccggagctgcccaagccctccatctccagcaacaactccaaccccgtggaggacaaggatgctgtggccttcacctgtgaacctgaggttcagaacacaacctacctgtggtgggtaaatggtcagagcctcccggtcagtcccaggctgcagctgtccaatggcaacatgaccctcactctactcagcgtcaaaaggaacgatgcaggatcctatgaatgtgaaatacagaacccagcgagtgccaaccgcagtgacccagtcaccctgaatgtcctctatggcccagatgtccccaccatttccccctcaaaggccaattaccgtccaggggaaaatctgaacctctcctgccacgcagcctctaacccacctgcacagtactcttggtttatcaatgggacgttccagcaatccacacaagagctctttatccccaacatcactgtgaataatagcggatcctatatgtgccaagcccataactcagccactggcctcaataggaccacagtcacgatgatcacagtctctggaagtgctcctgtcctctcagctgtggccaccgtcggcatcacgattggagtgctggccagggtggctctgatatagcagccctggtgtattttcgatatttcaggaagactggcagattggaccagaccctgaattcttctagctcctccaatcccattttatcccatggaaccactaaaaacaaggtctgctctgctcctgaagccctatatgctggagatggacaactcaatgaaaatttaaagggaaaaccctcaggcctgaggtgtgtgccactcagagacttcacctaactagagacagtcaaactgcaaaccatggtgagaaattgacgacttcacactatggacagcttttcccaagatgtcaaaacaagactcctcatcatgataaggctcttacccccttttaatttgtccttgcttatgcctgcctctttcgcttggcaggatgatgctgtcattagtatttcacaagaagtagcttcagagggtaacttaacagagtgtcagatctatcttgtcaatcccaacgttttacataaaataagagatcctttagtgcacccagtgactgacattagcagcatctttaacacagccgtgtgttcaaatgtacagtggtccttttcagagttggacttctagactcacctgttctcactccctgttttaattcaacccagccatgcaatgccaaataatagaattgctccctaccagctgaacagggaggagtctgtgcagtttctgacacttgttgttgaacatggctaaatacaatgggtatcgctgagactaagttgtagaaattaacaaatgtgctgcttggttaaaatggctacactcatctgactcattctttattctattttagttggtttgtatcttgcctaaggtgcgtagtccaactcttggtattaccctcctaatagtcatactagtagtcatactccctggtgtagtgtattctctaaaagctttaaatgtctgcatgcagccagccatcaaatagtgaatggtctctctttggctggaattacaaaactcagagaaatgtgtcatcaggagaacatcataacccatgaaggataaaagccccaaatggtggtaactgataatagcactaatgctttaagatttggtcacactctcacctaggtgagcgcattgagccagtggtgctaaatgctacatactccaactgaaatgttaaggaagaagatagatccaaaaaaaaaaaaaaaaaa

SEQ ID NO: 35 - DNA, 1189 bp, Homo sapiens
acagcagggccaacagtcacagcagccctgaccagagcattcctggagctcaagctctctacaaagaggtggacagagaagacagcagagaccatgggacccccctcagcccctccctgcagattgcatgtcccctggaaggaggtcctgctcacagcctcacttctaaccttctggaacccacccaccactgccaagctcactattgaatccacgccattcaatgtcgcagaggggaaggaggttcttctactcgcccacaacctgccccagaatcgtattggttacagctggtacaaaggcgaaagagtggatggcaacagtctaattgtaggatatgtaataggaactcaacaagctaccccagggcccgcatacagtggtcgagagacaatataccccaatgcatccctgctgatccagaacgtcacccagaatgacacaggattctataccctacaagtcataaagtcagatcttgtgaatgaagaagcaaccggacagttgcatgtatacccggagctgcccaagccctccatctccagcaacaactccaaccccgtggaggacaaggatgctgtggccttcacctgtgaacctgaggttcagaacacaacctacctgtggtgggtaaatggtcagagcctcccggtcagtcccaggctgcagctgtccaatggcaacatgaccctcactctactcagcgtcaaaaggaacgatgcaggatcctatgaatgtgaaatacagaacccagcgagtgccaaccgcagtgacccagtcaccctgaatgtcctctatggcccagatggccccaccatttccccctcaaaggccaattaccgtccaggggaaaatctgaacctctcctgccacgcagcctctaacccacctgcacagtactcttggtttatcaatgggacgttccagcaatccacacaagagctctttatccccaacatcactgtgaataatagcggatcctatatgtgccaagcccataactcagccactggcctcaataggaccacagtcacgatgatcacagtctctggaagtgctcctgtcctctcagctgtggccaccgtcggcatcacgattggagtgctggccagggtggctctgatatagcagccctggtgtattttcgatatttcaggaagactggcagattggaccagaccctgaattc

SEQ ID NO: 36 - DNA, 2249 bp, Homo sapiens; identical to SEQ ID NO: 34

SEQ ID NO: 37 - DNA, 2533 bp, Homo sapiens
ggagctcaagctcctctacaaagaggtggacagagaagacagcagagaccatgggacccccctcagcccctccctgcagattgcatgtcccctggaaggaggtcctgctcacagcctcacttctaaccttctggaacccacccaccactgccaagctcactattgaatccacgccattcaatgtcgcagaggggaaggaggttcttctactcgcccacaacctgccccagaatcgtattggttacagctggtacaaaggcgaaagagtggatggcaacagtctaattgtaggatatgtaataggaactcaacaagctaccccagggcccgcatacagtggtcgagagacaatataccccaatgcatccctgctgatccagaacgtcacccagaatgacacaggattctataccctacaagtcataaagtcagatcttgtgaatgaagaagcaaccggacagttccatgtatacccggagctgcccaagccctccatctccagcaacaactccaaccccgtggaggacaaggatgctgtggccttcacctgtgaacctgaggttcagaacacaacctacctgtggtgggtaaatggtcagagcctcccggtcagtcccaggctgcagctgtccaatggcaacatgaccctcactctactcagcgtcaaaaggaacgatgcaggatcctatgaatgtgaaatacagaacccagcgagtgccaaccgcagtgacccagtcaccctgaatgtcctctatggcccagatgtccccaccatttccccctcaaaggccaattaccgtccaggggaaaatctgaacctctcctgccacgcagcctctaacccacctgcacagtactcttggtttatcaatgggacgttccagcaatccacacaagagctctttatccccaacatcactgtgaataatagcggatcctatatgtgccaagcccataactcagccactggcctcaataggaccacagtcacgatgatcacagtctctggaagtgctcctgtcctctcagctgtggccaccgtcggcatcacgattggagtgctggccagggtggctctgatatagcagccctggtgtattttcgatatttcaggaagactggcagattggaccagaccctgaattcttctagctcctccaatcccattttatcccatggaaccactaaaaacaaggtctgctctgctcctgaagccctatatgctggagatggacaactcaatgaaaatttaaagggaaaaccctcaggcctgaggtgtgtgccactcagagacttcacctaactagagacagtcaaactgcaaaccatggtgagaaattgacgacttcacactatggacagcttttcccaagatgtcaaaacaagactcctcatcatgataaggctcttacccccttttaatttgtccttgcttatgcctgcctctttcgcttggcaggatgatgctgtcattagtatttcacaagaagtagcttcagagggtaacttaacagagtgtcagatctatcttgtcaatcccaacgttttacataaaataagagatcctttagtgcacccagtgactgacattagcagcatctttaacacagccgtgtgttcaaatgtacagtggtccttttcagagttggacttctagactcacctgttctcactccctgttttaattcaacccagccatgcaatgccaaataatagaattgctccctaccagctgaacagggaggagtctgtgcagtttctgacacttgttgttgaacatggctaaatacaatgggtatcgctgagactaagttgtagaaattaacaaatgtgctgcttggttaaaatggctacactcatctgactcattctttattctattttagttggtttgtatcttgcctaaggtgcgtagtccaactcttggtattaccctcctaatagtcatactagtagtcatactccctggtgtagtgtattctctaaaagctttaaatgtctgcatgcagccagccatcaaatagtgaatggtctctctttggctggaattacaaaactcagagaaatgtgtcatcaggagaacatcataacccatgaaggataaaagccccaaatggtggtaactgataatagcactaatgctttaagatttggtcacactctcacctaggtgagcgcattgagccagtggtgctaaatgctacatactccaactgaaatgttaaggaagaagatagatccaattaaaaaaaattaaaaccaatttaaaaaaaaaaaagaacacaggagattccagtctacttgagttagcataatacagaagtcccctctactttaacttttacaaaaaagtaacctgaactaatctgatgttaaccaatgtatttatttctgtggttctgtttccttgttccaatttgacaaaacccactgttcttgtattgtattgcccagggggagctatcactgtacttgtagagtggtgctgctttaattcataaatcacaaataaaagccaattagctctataact

SEQ ID NO: 38 - DNA, 2287 bp, Homo sapiens
ggacagcacagctgacagccgtgctcagaaagtttctggatcccaggctcatctccacagaggagaacacgcaggcagcagagaccatggggcccatctcagccccttcctgcagatggcgcatcccctggcaggggctcctgctcacagcctcacttttcaccttctggaacccgcccaccactgctcagctcactattgaagctgtgccatccaatgctgcagaggggaaggaggttcttctacttgtccacaatctgccccaggaccctcgtggctacaactggtacaaaggggaaacagtggatgccaaccgtcgaattataggatatgtaatatcaaatcaacagattaccccagggcctgcatacagcaatcgagagacaatataccccaatgcatccctgctgatgcggaacgtcaccagaaatgacacaggatcctacaccctacaagtcataaagctaaatcttatgagtgaagaagtaactggccagttcagcgtacatccggagactcccaagccctccatctccagcaacaactccaaccccgtggaggacaaggatgctgtggccttcacctgtgaacctgagactcagaacacaacctacctgtggtgggtaaatggtcagagtctcccggtcagtcccaggctgcagctgtccaatggcaacaggaccctcactctactcagtgtcacaaggaatgacgtaggaccctatgaatgtgaaatacagaacccagcgagtgcaaacttcagtgacccagtcaccctgaatgtcctctatggcccagatgcccccaccatttccccttcagacacctattaccatgcaggggtaaatctcaacctctcctgccatgcggcctctaatccaccctcacagtattcttggtctgtcaatggcacattccagcaatacacacaaaagctctttatccccaacatcactacaaagaacagcggatcctatgcctgccacaccactaactcagccactggccgcaacaggaccacagtcaggatgatcacagtctctgatgctgtagtacaaggaagttctcctggcctctcagctagagccactgtcagcatcatgattggagtactggccagggtggctctgatatagtagctctggtgtagtttctgcatttcaagaagactggcagacagttgtttttattcttcctcaaagcatttgcaatcagctaccattcaaaattgcttcttcttcaagatttatggaaaatactctgacgagtactcttgaacacaagttcctgataactttaagatcacgccactggactgtctatgaacttgcaaacaggctgatacctttgtgaagttgcccaccaaaacacagaaggaaaaaaacatgaatttcattgaactaaataataatgaggataatgtttttaagattttttttttttttttttttgagatggaatctcgctctgtcgcccaggctggagtgcagtggcacgatctcaactcactgcaacgtccgcctcctgggttcacaccattctcctgcctcagcctcctgagtagctgggactacaggcgcctgccacaacgcccggctaattttttgtatttttagtagagacggggtttcactgtggtctcaatctcctgacttcatggtccgcctgcctcagcctcccaaagttctgggattacaggtgtgagccaccgcgcccagcccgtttttaagattttttatttgaaaaattgccaattctttaagtgttttctttttcagatttatgaatttctttatcttttaagctatctataccttactgcaatttggtaaagcagacttttgtgaacaaaaattataacatttacttttgctccctacctgactgccacagaactgggcaactattcatgagtattcatatgtttatggtaattcagttatttgcacaagttcagtgagaatctgctgtctttataatgggatatagtttaaaacattggttatattaccaaggctttgattgggatgttatatttgagaaaatacagagaatgatagattaacggagtgtctaatctatcgtgtcaaccccaaatttttacgtatgagatcctttagtccacccaatggctgacagtaacagcatctttaacacaactctttgttcaaatgtactatggtctcttttagagtcagactcctagactcacttgttctcactgtctgttttaatttaacccaggcatgcaatgctagataataaaattgctccctattggctgatc

SEQ ID NO: 39 - DNA, 2297 bp, Homo sapiens
agccgtgctcagaaagtttctggatcccaggctcatctccacagaggagaacacgcaggcagcagagaccatggggcccatctcagccccttcctgcagatggcgcatcccctggcaggggctcctgctcacagcctcacttttcaccttctggaacccgcccaccactgctcagctcactattgaagctgtgccatccaatgctgcagaggggaaggaggttcttctacttgtccacaatctgccccaggaccctcgtggctacaactggtacaaaggggaaacagtggatgccaaccgtcgaattataggatatgtaatatcaaatcaacagattaccccagggcctgcatacagcaatcgagagacaatataccccaatgcatccctgctgatgcggaacgtcaccagaaatgacacaggatcctacaccctacaagtcataaagctaaatcttatgagtgaagaagtaactggccagttcagcgtacatccggagactcccaagccctccatctccagcaacaactccaaccccgtggaggacaaggatgctgtggccttcacctgtgaacctgagactcagaacacaacctacctgtggtgggtaaatggtcagagtctcccggtcagtcccaggctgcagctgtccaatggcaacaggaccctcactctactcagtgtcacaaggaatgacgtaggaccctatgaatgtgaaatacagaacccagcgagtgcaaacttcagtgacccagtcaccctgaatgtcctctatggcccagatgcccccaccatttccccttcagacacctattaccatgcaggggtaaatctcaacctctcctgccatgcggcctctaatccaccctcacagtattcttggtctgtcaatggcacattccagcaatacacacaaaagctctttatccccaacatcactacaaagaacagcggatcctatgcctgccacaccactaactcagccactggccgcaacaggaccacagtcaggatgatcacagtctctgatgctttagtacaaggaagttctcctggcctctcagctagagccactgtcagcatcatgattggagtactggccagggtggctctgatatagtagctctggtgtagtttctgcatttcaagaagactggcagacagttgtttttattcttcctcaaagcatttgcaatcagctaccattcaaaattgcttcttcttcaagatttatggaaaatactctgacgagtactcttgaacacaagttcctgataactttaagatcacgccactggactgtctatgaacttgcaaacaggctgatacctttgtgaagttgcccaccaaaacacagaaggaaaaaaacatgaatttcattgaactaaataataatgaggataatgtttttaagatttttttttttttttgagatggaatctcgctctgtcgcccaggctggagtgcagtggcacgatctcaactcactgcaagctccgcctcctgggttcacaccattctcctgcctcagcctcctgagtagctgggactacaggcgcctgccacaacgcccggctaattttttgtatttttagtagagacggggtttcactgtggtctcaatctcctgacttcatggtccgcctgcctcagcctcccaaagttctgggattacaggtgtgagccaccgcgcccagcccgtttttaagattttttatttgaaaaattgccaattctttaagtgttttctttttcagatttatgaatttctttatcttttaagctatctataccttactgcaatttggtaaagcagacttttgtgaacaaaaattataacatttacttttgctccctacctgactgccacagaactgggcaactattcatgagtattcatatgtttatggtaattcagttatttgcacaagttcagtgagaatctgctgtctttataatgggatatagtttaaaacattggttatattaccaaggctttgattgggatgttatatttgagaaaatacagagaatgatagattaacggagtgtctaatctatcgtgtcaaccccaaatttttacgtatgagatcctttagtccacccaatggctgacagtaacagcatctttaacacaactctttgttcaaatgtactatggtctcttttagagtcagactcctagactcacttgttctcactgtctgttttaatttaacccaggcatgcaatgctagataataaaattgctccctattggctgatcaaaaaaaaaaaaaaaaaaaaaaaaaaaaaaa

SEQ ID NO: 40 - DNA, 2297 bp, Homo sapiens; identical to SEQ ID NO: 39

SEQ ID NO: 41 - DNA, 1364 bp, Homo sapiens
gcacagaggagaacacgcaggcagcagagaccatggggcccatctcagccccttcctgcagatggcgcatcccctggcaggggctcctgctcacagcctcacttttcaccttctggaacccgcccaccactgctcagctcactattgaagctgtgccatccaatgctgcagaggggaaggaggttcttctacttgtccacaatctgccccaggaccctcgtggctacaactggtacaaaggggaaacagtggatgccaaccgtcgaattataggatatgtaatatcaaatcaacagattaccccagggcctgcatacagcaatcgagagacaatataccccaatgcatccctgctgatgcggaacgtcaccaaaaatgacacaggatcctacaccctacaagtcataaagctaaatcttatgagtgaagaagtaactggccagttcagcgtacatccggagactcccaagccctccatctccagcaacaactccaaccccgtggaggacaaggatgctgtggccttcacctgtgaacctgagactcagaacacaacctacctgtggtgggtaaatggtcagagtctcccggtcagtcccaggctgcagctgtccaatggcaacaggaccctcactctactcagtgtcacaaggaatgacgtaggaccctatgaatgtgaaatacagaacccagcgagtgcaaacttcagtgacccagtcaccctgaatgtcctctatggcccagatgcccccaccatttccccttcagacacctattaccatgcaggggtaaatctcaacctctcctgccatgcggcctctaatccaccctcacagtattcttggtctgtcaatggcacattccagcaatacacacaaaagctctttatccccaacatcactacaaagaacagcggatcctatgcctgccacaccactaactcagccactggccgcaacaggaccacagtcaggatgatcacagtctctgatgctttagtacaaggaagttctcctggcctctcagctagagccactgtcagcatcatgattggagtactggccagggtggctctgatatagtagctctggtgtagtttctgcatttcaagaagactggcagacagttgtttttattcttcctcaaagcatttgcaatcagctaccattcaaaattgcttcttcttcaagatttatggaaaatactctgacgagtactcttgaacacaagttcctgataactttaagatcacgccactggactgtctatgaacttgcaaacaggctgatacctttgtgaagttgcccaccaaaacacagaaggaaaaaaacatgaatttcattgaactaaataataatgaggcg

SEQ ID NO: 42 - DNA, 2287 bp, Homo sapiens; identical to SEQ ID NO: 38

SEQ ID NO: 43 - DNA, 1341 bp, Homo sapiens
ggcacgaggctgctggctcacctccgagccacctctgctgcgcaccgcagcctcggacctacagcccaggatactttgggacttgccggcgctcagaaacgcgcccagacggcccctccaccttttgtttgcctagggtcgccgagagcgcccggagggaaccgcctggccttcggggaccaccaattttgtctggaaccaccctcccggcgtatcctactccctgtgccgcgaggccatcgcttcactggaggggtcgatttgtgtgtagtttggtgacaagatttgcattcacctggcccaaaccctttttgtctctttgggtgaccggaaaactccacctcaagttttcttttgtggggctgccccccaagtgtcgtttgttttactgtagggtctcccgcccggcgcccccagtgttttctgagggcggaaatggccaattcgggcctgcagttgctgggcttctccatggccctgctgggctgggtgggtctggtggcctgcaccgccatcccgcagtggcagatgagctcctatgcgggtgacaacatcatcacggcccaggccatgtacaaggggctgtggatggactgcgtcacgcagagcacggggatgatgagctgcaaaatgtacgactcggtgctcgccctgtccgcggccttgcaggccactcgagccctaatggtggtctccctggtgctgggcttcctggccatgtttgtggccacgatgggcatgaagtgcacgcgctgtgggggagacgacaaagtgaagaaggcccgtatagccatgggtggaggcataattttcatcgtggcaggtcttgccaccttggtagcttgctcctggtatggccatcagattgtcacagacttttataaccctttgatccctaccaacattaagtatgagtttggccctgccatctttattggctgggcagggtctgccctagtcatcctgggaggtgcactgctctcctgttcctgtcctgggaatgagagcaaggctgggtaccgtgcaccccgctcttaccctaagtccaactcttccaaggagtatgtgtgacctgggatctccttgccccagcctgacaggctatgggagtgtctagatgcctgaaagggcctggggctgagctcagcctgtgggcagggtgccggacaaaggcctcctggtcactctgtccctgcactccatgtatagtcctcttgggttgggggtgggggggtgccgttggtgggagagacaaaaagagggagagtgtgctttttgtacagtaataaaaaataagtattgggaaaaaaaaaaaaaaaaaaaaaaaaaaaaaaaaaaaaa

SEQ ID NO: 44 - DNA, 1207 bp, Homo sapiens
tccagttaggagccttgatgccggaggggacagtgggtcgccgagagcgcccggagggaaccgcctggccttcggggaccaccaattttgtctggaaccaccctcccggcgtatcctactccctgtgccgcgaggccatcgcttcactggaggggtcgatttgtgtgtagtttggtgacaagatttgcattcacctggcccaaaccctttttgtctctttgggtgaccggaaaactccacctcaagttttcttttgtggggctgccccccaagtgtcgtttgttttactgtagggtctcccgcccggcgcccccagtgttttctgagggcggaaatggccaattcgggcctgcagttgctgggcttctccatggccctgctgggctgggtgggtctggtggcctgcaccgccatcccgcagtggcagatgagctcctatgcgggtgacaacatcatcacggcccaggccatgtacaaggggctgtggatggactgcgtcacgcagagcacggggatgatgagctgcaaaatgtacgactcggtgctcgccctgtccgcggccttgcaggccactcgagccctaatggtggtctccctggtgctgggcttcctggccatgtttgtggccacgatgggcatgaagtgcacgcgctgtgggggagacgacaaagtgaagaaggcccgtatagccatgggtggaggcataattttcatcgtggcaggtcttgccgccttggtagcttgctcctggtatggccatcagattgtcacagacttttataaccctttgatccctaccaacattaagtatgagtttggccctgccatctttattggctgggcagggtctgccctagtcatcctgggaggtgcactgctctcctgttcctgtcctgggaatgagagcaaggctgggtaccgtgcaccccgctcttaccctaagtccaactcttccaaggagtatgtgtgacctgggatctccttgccccagcctgacaggctatgggagtgtctagatgcctgaaagggcctggggctgagctcagcctgtgggcagggtgccggacaaaggcctcctggtcactctgtccctgcactccatgtatagtcctcttgggttgggggtgggggggtgccgttggtgggagagacaaaaagagggagagtgtgctttttgtacagtaataaaaaataagtattgggaagc

SEQ ID NO: 45 - DNA, 1207 bp, Homo sapiens; identical to SEQ ID NO: 44

SEQ ID NO: 46 - DNA, 2486 bp, Homo sapiens
acccggagcgggaagatggcggcggcgcaggaggcggacggggcccgcagcgccgtggtggcggccgggggaggcagctccggtcaggtgaccagcaatggcagcatcgggagggacccgccagcggagacccagcctcagaacccaccggcccagccggcacccaatgcctggcaggtcatcaaaggtgtgctgtttaggatcttcatcatctgggccatcagcagttggttccgccgagggccggcccctcaggaccaggcgggccccggaggagccccacgcgtcgccagccgcaacctgttccccaaagacactttaatgaacctgcatgtgtacatctcagagcacgagcactttacagacttcaacgccacgtcggcactcttctgggaacagcacgatcttgtgtatggcgactggactagcggcgagaactcagacggctgctacgagcactttgctgagctcgatatcccacagagcgtccagcagaacggctccatctacatccacgtttacttcaccaagagtggcttccacccagacccccggcagaaggccctgtaccgccggcttgccacagtccacatgtcccggatgatcaacaaatacaagcgcagacgatttcagaaaaccaagaacctgctgacaggagagacagaagcggacccagaaatgatcaagagggctgaggactatgggcctgtggaggtgatctcccattggcaccccaacatcaccatcaacatcgtggacgaccacacgccgtgggtgaagggcagtgtgccccctcccctggatcaatatgtgaagttcgacgccgtgagcggtgactactatcccatcatctacttcaatgactactggaacctgcagaaggactactaccccatcaacgagagcctggccagcctgccgctccgcgtctccttctgcccactctcgctttggcgctggcagctctatgctgcccagagcaccaagtcgccctggaacttcctgggcgatgagttgtacgagcagtcagatgaggagcaggactcggtgaaggtggccctgctggagaccaacccctacctgctggcgctcaccatcatcgtgtctatcgttcacagtgtcttcgagttcctggccttcaagaatgatatccagttctggaacagccggcagtccctggagggcctgtccgtgcgctccgtcttcttcggcgttttccagtcattcgtggtcctcctctacatcctggacaacgagaccaacttcgtggtccaggtcagcgtcttcattggggtcctcatcgacctctggaagatcaccaaggtcatggacgtccggctggaccgagagcacagggtggcaggaatcttcccccgcctatccttcaaggacaagtccacgtatatcgagtcctcgaccaaagtgtatgatgatatggcattccggtacctgtcctggatcctcttcccgctcctgggctgctatgccgtctacagtcttctgtacctggagcacaagggctggtactcctgggtgctcagcatgctctacggcttcctgctgaccttcggcttcatcaccatgacgccccagctcttcatcaactacaagctcaagtctgtggcccaccttccctggcgcatgctcacctacaaggccctcaacacattcatcgacgacctgttcgcctttgtcatcaagatgcccgttatgtaccggatcggctgcctgcgggacgatgtggttttcttcatctacctctaccaacggtggatctaccgcgtcgaccccacccgagtcaacgagtttggcatgagtggagaagaccccacagctgccgcccccgtggccgaggttcccacagcagcaggggccctcacgcccacacctgcacccaccacgaccaccgccaccagggaggaggcctccacgtccctgcccaccaagcccacccagggggccagctctgccagcgagccccaggaagcccctccaaagccagcagaggacaagaaaaaggattagtcgagactggtcctcacctgctccggctcctggcgaccactacccctgcgtcccggccccctcgcctcccctccctgtcgccctttccctggacagatcaggccggggcggtgggaggcccgcctcaggtcagggcccagcgtgtgacgtaggggccggggcaggccagggtttgtttgtggaggcgctgtctgtccctctgtccctctgtgtttccagccatctcgccctgccagcccagcaccactgggaatcatggtgaagctgatgcagcgttgccgagggggtgggttgggcgggggtggggccgggcccccctacgggatgcccacggccgttcatcatcttgtccctcgtccccctaccacactccccctcctagaccgccgccctttaacacagtctggatttaataaattcatatgggtgtttaacttaaactcaaaaaaaaaaaaaaaaaa

SEQ ID NO: 47 - DNA, 2486 bp, Homo sapiens; identical to SEQ ID NO: 46

SEQ ID NO: 48 - DNA, 2317 bp, Homo sapiens
ggcacgagggtcggggacggggcggggctggcggcgggggcggggacccggagcgggaagatggcggcggcgcaggaggcggacggggcccgcagcgccgtggtggcggccgggggaggcagctccggtcaggtgaccagcaatggcagcatcgggagggacccgccagcggagacccagcctcagaacccaccggcccagccggcacccaatgcctggcaggtcatcaaaggtgtgctgtttaggatcttcatcatctgggccatcagcagttggttccgccgagggccggcccctcaggaccaggcgggccccggaggagccccacgcgtcgccagccgcaacctgttccccaaagacactttaatgaacctgcatgtgtacatctcagagcacgagcactttacagacttcaacgccacgtcggcactcttctgggaacagcacgatcttgtgtatggcgactggactagcggcgagaactcagacggctgctacgagcactttgctgagctcgatatcccacagagcgtccagcagaacggctccatctacatccacgtttacttcaccaagagtggcttccacccagacccccggcagaaggccctgtaccgccggcttgccacagtccacatgtcccggatgatcaacaaatacaagcgcagacgatttcagaaaaccaagaacctgctgacaggagagacagaagcggacccagaaatgatcaagagggctgaggactatgggcctgtggaggtgatctcccattggcaccccaacatcaccatcaacatcgtggacgaccacacgccgtgggtgaagggcagtgtgccccctcccctggatcaatatgtgaagttcgacgccgtgagcggtgactactatcccatcatctacttcaatgactactggaacctgcagaaggactactaccccatcaacgagagcctggccagcctgccgctccgcgtctccttctgcccgctctcgctttggcgctggcagctctatgctgcccagagcaccaagtcgccctggaacttcctgggtgatgagttgtacgagcagtcagatgaggagcaggactcggtgaaggtggccctgctggagaccaacccctacctgctggcgctcaccatcatcgtgtctatcgttcacagtgtcttcgagttcctggccttcaagaatgatatccagttctggaacagccggcagtccctggagggcctgtccgtgcgctccgtcttcttcggcgttttccagtcattcgtggtcctcctctacatcctggacaacgagaccaacttcgtggtccaggtcagcgtcttcattggggtcctcatcgacctctggaagatcaccaaggtcatggacgtccggctggaccgagagcacagggtggcaggaatcttcccccgcctatccttcaaggacaagtccacgtatatcgagtcctcgaccaaagtgtatgatgatatggcattccggtacctgtcctggatcctcttcccgctcctgggctgctatgccgtctacagtcttctgtacctggagcacaagggctggtactcctgggtgctcagcatgctctacggcttcctgctgaccttcggcttcatcaccatgacgccccagctcttcatcaactacaagctcaagtctgtggcccaccttccctggcgcatgctcacctacaaggccctcaacacattcatcgacgacctgttcgcctttgtcatcaagatgcccgttatgtaccggatcggctgcctgcgggacgatgtggttttcttcatctacctctaccaacggtggatctaccgcgtcgaccccacccgagtcaacgagtttggcatgagtggagaagaccccacagctgccgcccccgtggccgaggttcccacagcagcaggggccctcacgcccacacctgcacccaccacgaccaccgccaccagggaggaggcctccacgtccctgcccaccaagcccacccagggggccagctctgccagcgagccccagggtttgtttgtggaggcgctgtctgtccctctgtccctctgtgtttccagccatctcgccctgccagcccagcaccactgggaatcatggtgaagctgatgcagcgttgccgagggggtgggttgggcgggggtggggccgggcccccctacgggatgcccacggccgttcatcatcttgtccctcgtccccctaccacactccccctcctagaccgccgccctttaacacagtctggatttaataaattcatatgggtgtttaacttaaaaaaaaaaaaaaaaaaaaa

SEQ ID NO: 49 - DNA, 2476 bp, Homo sapiens
ggaagatggcggcggcgcaggaggcggacggggcccgcagcgccgtggtggcggccgggggaggcagctccggtcaggtgaccagcaatggcagcatcgggagggacccgccagcggagacccagcctcagaacccaccggcccagccggcacccaatgcctggcaggtcatcaaaggtgtgctgtttaggatcttcatcatctgggccatcagcagttggttccgccgagggccggcccctcaggaccaggcgggccccggaggagccccacgcgtcgccagccgcaacctgttccccaaagacactttaatgaacctgcatgtgtacatctcagagcacgagcactttacagacttcaacgccacgtcggcactcttctgggaacagcacgatcttgtgtatggcgactggactagcggcgagaactcagacggctgctacgagcactttgctgagctcgatatcccacagagcgtccagcagaacggctccatctacatccacgtttacttcaccaagagtggcttccacccagacccccggcagaaggccctgtaccgccggcttgccacagtccacatgtcccggatgatcaacaaatacaagcgcagacgatttcagaaaaccaagaacctgctgacaggagagacagaagcggacccagaaatgatcaagagggctgaggactatgggcctgtggaggtgatctcccattggcaccccaacatcaccatcaacatcgtggacgaccacacgccgtgggtgaagggcagtgtgccccctcccctggatcaatatgtgaagttcgacgccgtgagcggtgactactatcccatcatctacttcaatgactactggaacctgcagaaggactactaccccatcaacgagagcctggccagcctgccgctccgcgtctccttctgcccgctctcgctttggcgctggcagctctatgctgcccagagcaccaagtcgccctggaacttcctgggtgatgagttgtacgagcagtcagatgaggagcaggactcggtgaaggtggccctgctggagaccaacccctacctgctggcgctcaccatcatcgtgtctatcgttcacagtgtcttcgagttcctggccttcaagaatgatatccagttctggaacagccggcagtccctggagggcctgtccgtgcgctccgtcttcttcggcgttttccagtcattcgtggtcctcctctacatcctggacaacgagaccaacttcgtggtccaggtcagcgtcttcattggggtcctcatcgacctctggaagatcaccaaggtcatggacgtccggctggaccgagagcacagggtggcaggaatcttcccccgcctatccttcaaggacaagtccacgtatatcgagtcctcgaccaaagtgtatgatgatatggcattccggtacctgtcctggatcctcttcccgctcctgggctgctatgccgtctacagtcttctgtacctggagcacaagggctggtactcctgggtgctcagcatgctctacggcttcctgctgaccttcggcttcatcaccatgacgccccagctcttcatcaactacaagctcaagtctgtggcccaccttccctggcgcatgctcacctacaaggccctcaacacattcatcgacgacctgttcgcctttgtcatcaagatgcccgttatgtaccggatcggctgcctgcgggacgatgtggttttcttcatctacctctaccaacggtggatctaccgcgtcgaccccacccgagtcaacgagtttggcatgagtggagaagaccccacagctgccgcccccgtggccgaggttcccacagcagcaggggccctcacgcccacacctgcacccaccacgaccaccgccaccagggaggaggcctccacgtccctgcccaccaagcccacccagggggccagctctgccagcgagccccaggaagcccctccaaagccagcagaggacaagaaaaaggattagtcgagactggtcctcacctgctccggctcctggcgaccactacccctgcgtcccggccccctcgcctcccctccctgtcgccctttccctggacagatcaggccggggcggtgggaggcccgcctcaggtcagggcccagcgtgtgacgtaggggccggggcaggccagggtttgtttgtggaggcgctgtctgtccctctgtccctctgtgtttccagccatctcgccctgccagcccagcaccactgggaatcatggtgaagctgatgcagcgttgccgagggggtgggttgggcgggggtggggccgggcccccctacgggatgcccacggccgttcatcatcttgtccctcgtccccctaccacactccccctcctagaccgccgccctttaacacagtctggatttaataaattcatatgggtgtttaacttaaactcaaaaaaaaaaaaaaaaaa

SEQ ID NO: 50 - DNA, 2468 bp, Homo sapiens
acccggagcgggaagatggcggcggcgcaggaggcggacggggcccgcagcgccgtggtggcggccgggggaggcagctccggtcaggtgaccagcaatggcagcatcgggagggacccgccagcggagacccagcctcagaacccaccggcccagccggcacccaatgcctggcaggtcatcaaaggtgtgctgtttaggatcttcatcatctgggccatcagcagttggttccgccgagggccggcccctcaggaccaggcgggccccggaggagccccacgcgtcgccagccgcaacctgttccccaaagacactttaatgaacctgcatgtgtacatctcagagcacgagcactttacagacttcaacgccacgtcggcactcttctgggaacagcacgatcttgtgtatggcgactggactagcggcgagaactcagacggctgctacgagcactttgctgagctcgatatcccacagagcgtccagcagaacggctccatctaaatccacgtttacttcaccaagagtggcttccacccagacccccggcagaaggccctgtaccgccggcttgccacagtccacatgtcccggatgatcaacaaatacaagcgcagacgatttcagaaaaccaagaacctgctgacaggagagacagaagcggacccagaaatgatcaagagggctgaggactatgggcctgtggaggtgatctcccattggcaccccaacatcaccatcaacatcgtggacgaccacacgccgtgggtgaagggcagtgtgccccctcccctggatcaatatgtgaagttcgacgccgtgagcggtgactactatcccatcatctacttcaatgactactggaacctgcagaaggactactaccccatcaacgagagcctggccagcctgccgctccgcgtctccttctgcccgctctcgctttggcgctggcagctctatgctgcccagagcaccaagtcgccctggaacttcctgggtgatgagttgtacgagcagtcagatgaggagcaggactcggtgaaggtggccctgctggagaccaacccctacctgctggcgctcaccatcatcgtgtctatcgttcacagtgtcttcgagttcctggccttcaagaatgatatccagttctggaacagccggcagtccctggagggcctgtccgtgcgctccgtcttcttcggcgttttccagtcattcgtggtcctcctctacatcctggacaacgagaccaacttcgtggtccaggtcagcgtcttcattggggtcctcatcgacctctggaagatcaccaaggtcatggacgtccggctggaccgagagcacagggtggcaggaatcttcccccgcctatccttcaaggacaagtccacgtatatcgagtcctcgaccaaagtgtatgatgatatggcattccggtacctgtcctggatcctcttcccgctcctgggctgctatgccgtctacagtcttctgtacctggagcacaagggctggtactcctgggtgctcagcatgctctacggcttcctgctgaccttcggcttcatcaccatgacgccccagctcttcatcaactacaagctcaagtctgtggcccaccttccctggcgcatgctcacctacaaggccctcaacacattcatcgacgacctgttcgcctttgtcatcaagatgcccgttatgtaccggatcggctgcctgcgggacgatgtggttttcttcatctacctctaccaacggtggatctaccgcgtcgaccccacccgagtcaacgagtttggcatgagtggagaagaccccacagctgccgcccccgtggccgaggttcccacagcagcaggggccctcacgcccacacctgcacccaccacgaccaccgccaccagggaggaggcctccacgtccctgcccaccaagcccacccagggggccagctctgccagcgagccccaggaagcccctccaaagccagcagaggacaagaaaaaggattagtcgagactggtcctcacctgctccggctcctggcgaccactacccctgcgtcccggccccctcgcctcccctccctgtcgccctttccctggacagatcaggccggggcggtgggaggcccgcctcaggtcagggcccagcgtgtgacgtaggggccggggcaggccagggtttgtttgtggaggcgctgtctgtccctctgtccctctgtgtttccagccatctcgccctgccagcccagcaccactgggaatcatggtgaagctgatgcagcgttgccgagggggtgggttgggcgggggtggggccgggcccccctacgggatgcccacggccgttcatcatcttgtccctcgtccccctaccacactccccctcctagaccgccgccctttaacacagtctggatttaataaattcatatgggtgtttaacttaaactc

SEQ ID NO: 51 - DNA, 2469 bp, Homo sapiens
gacccggagcgggaagatggcggcggcgcaggaggcggacggggcccgcagcgccgtggtggcggccgggggaggcagctccggtcaggtgaccagcaatggcagcatcgggagggacccgccagcggagacccagcctcagaacccaccggcccagccggcacccaatgcctggcaggtcatcaaaggtgtgctgtttaggatcttcatcatctgggccatcagcagttggttccgccgagggccggcccctcaggaccaggcgggccccggaggagccccacgcgtcgccagccgcaacctgttccccaaagacactttaatgaacctgcatgtgtacatctcagagcacgagcactttacagacttcaacgccacgtcggcactcttctgggaacagcacgatcttgtgtatggcgactggactagcggcgagaactcagacggctgctacgagcactttgctgagctcgatatcccacagagcgtccagcagaacggctccatctacatccacgtttacttcaccaagagtggcttccacccagacccccggcagaaggccctgtaccgccggcttgccacagtccacatgtcccggatgatcaacaaatacaagcgcagacgatttcagaaaaccaagaacctgctgacaggagagacagaagcggacccagaaatgatcaagagggctgaggactatgggcctgtggaggtgatctcccattggcaccccaacatcaccatcaacatcgtggacgaccacacgccgtgggtgaagggcagtgtgccccctcccctggatcaatatgtgaagttcgacgccgtgagcggtgactactatcccatcatctacttcaatgactactggaacctgcagaaggactactaccccatcaacgagagcctggccagcctgccgctccgcgtctccttctgcccactctcgctttggcgctggcagctctatgctgcccagagcaccaagtcgccctggaacttcctgggcgatgagttgtacgagcagtcagatgaggagcaggactcggtgaaggtggccctgctggagaccaacccctacctgctggcgctcaccatcatcgtgtctatcgttcacagtgtcttcgagttcctggccttcaagaatgatatccagttctggaacagccggcagtccctggagggcctgtccgtgcgctccgtcttcttcggcgttttccagtcattcgtggtcctcctctacatcctggacaacgagaccaacttcgtggtccaggtcagcgtcttcattggggtcctcatcgacctctggaagatcaccaaggtcatggacgtccggctggaccgagagcacagggtggcaggaatcttcccccgcctatccttcaaggacaagtccacgtatatcgagtcctcgaccaaagtgtatgatgatatggcattccggtacctgtcctggatcctcttcccgctcctgggctgctatgccgtctacggtcttctgtacctggagcacaagggctggtactcctgggtgctcagcatgctctacggcttcctgctgaccttcggcttcatcaccatgacgccccagctcttcatcaactacaagctcaagtctgtggcccaccttccctggcgcatgctcacctacaaggccctcaacacattcatcgacgacctgttcgcctttgtcatcaagatgcccgttatgtaccggatcggctgcctgcgggacgatgtggttttcttcatctacctctaccaacggtggatctaccgcgtcgaccccacccgagtcaacgagtttggcatgagtggagaagaccccacagctgccgcccccgtggccgaggttcccacagcagcaggggccctcacgcccacacctgcacccaccacgaccaccgccaccagggaggaggcctccacgtccctgcccaccaagcccacccagggggccagctctgccagcgagccccaggaagcccctccaaagccagcagaggacaagaaaaaggattagtcgagactggtcctcacctgctccggctcctggcgaccactacccctgcgtcccggccccctcgcctcccctccctgtcgccctttccctggacagatcaggccggggcggtgggaggcccgcctcaggtcagggcccagcgtgtgacgtaggggccggggcaggccagggtttgtttgtggaggcgctgtctgtccctctgtccctctgtgtttccagccatctcgccctgccagcccagcaccactgggaatcatggtgaagctgatgcagcgttgccgagggggtgggttgggcgggggtggggccgggcccccctacgggatgcccacggccgttcatcatcttgtccctcgtccccctaccacactccccctcctagaccgccgccctttaacacagtctggatttaataaattcatatgggtgtttaacttaaactc

SEQ ID NO: 52 - DNA, 921 bp, Homo sapiens
tacaagctcaagtctgtggcccaccttccctggcgcatgctcacctacaaggccctcaacacattcatcgacgacctgttcgcctttgtcatcaagatgcccgttatgtaccggatcggctgcctgcgggacggcccacctggctgtggacgggccagcccgacctcacactgcctcccacccctctccagatgtggttttcttcatctacctctaccaacggtggatctaccgcgtcgaccccacccgagtcaacgagtttggcatgagtggagaagaccccacagctgccgcccccgtggccgaggttcccacagcagcaggggccctcacgcccacacctgcacccaccacgaccaccgccaccagggaggaggcctccacgtccctgcccaccaagcccacccagggggccagctctgccagcgagccccaggaagcccctccaaagccagcagaggacaagaaaaaggattagtcgagactggtcctcacctgctccggctcctggcgaccactacccctgcgtcccggccccctcgcctcccctccctgtcgccctttccctggacagatcaggccggggcggtgggaggcccgcctcaggtcagggcccagcgtgtgacgtaggggccggggcaggccagggtttgtttgtggaggcgctgtctgtccctctgtccctctgtgtttccagccatctcgccctgccagcccagcaccactgggaatcatggtgaagctgatgcagcgttgccgagggggtgggttgggcgggggtggggccgggcccccctacgggatgcccacggccgttcatcatcttgtccctcgtccccctaccacactccccctcctagaccgccgccctttaacacagtctggatttaataaattcatatgggtgtttaacttaaactc

SEQ ID NO: 53 - DNA, 3829 bp, Homo sapiens
aaggatggcacagggctggtgccctcggagcgtgtcctggtggggccccagcggctgcaggtgctgaatgcctcccacgaggactccggggcctacagctgccggcagcggctcacgcagcgcgtactgtgccacttcagtgtgcgggtgacagacgctccatcctcgggagatgacgaagacggggaggacgaggctgaggacacaggtgtggacacaggggccccttactggacacggcccgagcggatggacaagaagctgctggccgtgccggccgccaacaccgtccgcttccgctgcccagccgctggcaaccccactccctccatctcctggctgaagaacggcagggagttccgcggcgagcaccgcattggaggcatcaagctgcggcatcagcagtggagcctggtcatggaaagcgtggtgccctcggaccgcggcaactacacctgcgtcgtggagaacaagtttggcagcatccggcagacgtacacgctggacgtgctggagcgctccccgcaccggcccatcctgcaggcggggctgccggccaaccagacggcggtgctgggcagcgacgtggagttccactgcaaggtgtacagtgacgcacagccccacatccagtggctcaagcacgtggaggtgaatggcagcaaggtgggcccggacggcacaccctacgttaccgtgctcaagacggcgggcgctaacaccaccgacaaggagctagaggttctctccttgcacaacgtcacctttgaggacgccggggagtacacctgcctggcgggcaattctattgggttttctcatcactctgcgtggctggtggtgctgccagccgaggaggagctggtggaggctgacgaggcgggcagtgtgtatgcaggcatcctcagctacggggtgggcttcttcctgttcatcctggtggtggcggctgtgaccgtctgccgcctgcgcagcccccccaagaaaggcctgggctcccccaccgtgcacaagatctcccgcttcccgctcaagcgacaggtgtccctggagtccaacgcgtccatgagctccaacacaccactggtgcgcatcgcaaggctgtcctcaggggagggccccacgctggccaatgtctccgagctcgagctgcctgccgaccccaaatgggagctgtctcgggcccggctgaccctgggcaagccccttggggagggctgcttcggccaggtggtcatggcggaggccatcggcattgacaaggaccgggccgccaagcctgtcaccgtagccgtgaagatgctgaaagacgatgccactgacaaggacctgtcggacctggtgtctgagatggagatgatgaagatgatcgggaaacacaaaaacatcatcaacctgctgggcgcctgcacgcagggcgggcccctgtacgtgctggtggagtacgcggccaagggtaacctgcgggagtttctgcgggcgcggcggcccccgggcctggactactccttcgacacctgcaagccgcccgaggagcagctcaccttcaaggacctggtgtcctgtgcctaccaggtggcccggggcatggagtacttggcctcccagaagtgcatccacagggacctggctgcccgcaatgtgctggtgaccgaggacaacgtgatgaagatcgcagacttcgggctggcccgggacgtgcacaacctcgactactacaagaagacaaccaacggccggctccccgtgaagtggatggcgcctgaggccttgtttgaccgagtctacactcaccagagtgacgtctggtcctttggggtcctgctctgggagatcttcacgctggggggctccccgtaccccggcatccctgtggaggagctcttcaagctgctgaaggagggccaccgcatggacaagcccgccaactgcacacacgacctgtacatgatcatgcgggagtgctggcatgccgcgccctcccagaggcccaccttcaagcagctggtggaggacctggaccgtgtccttaccgtgacgtccaccgacgagtacctggacctgtcggcgcctttcgagcagtactccccgggtggccaggacacccccagctccagctcctcaggggacgactccgtgtttgcccacgacctgctgcccccggccccacccagcagtgggggctcgcggacgtgaagggccactggtccccaacaatgtgaggggtccctagcagcccaccctgctgctggtgcacagccactccccggcatgagactcagtgcagatggagagacagctacacagagctttggtctgtgtgtgtgtgtgtgcgtgtgtgtgtgtgtgtgcacatccgcgtgtgcctgtgtgcgtgcgcatcttgcctccaggtgcagaggtaccctgggtgtccccgctgctgtgcaacggtctcctgactggtgctgcagcaccgaggggcctttgttctggggggacccagtgcagaatgtaagtgggcccacccggtgggaccccgtggggcagggagctgggcccgacatggctcggcctctgcctttgcaccacgggacatcacagggtgcgctcggcccctcccacacccaaagctgagcctgcagggaagccccacatgtccagcaccttgtgcctggggtgttagtggcaccgcctccccacctccaggctttcccacttcccaccctgcccctcagagactgaaattacgggtacctgaagatgggagcctttaccttttatgcaaaaggtttattccggaaactagtgtacatttctataaatagatgctgtgtatatggtatatatacatatatatatataacatatatggaagaggaaaaggctggtacaacggaggcctgcgaccctgggggcacaggaggcaggcatggccctgggcggggcgtgggggggcgtggagggaggccccaggggtctcacccatgcaagcagaggaccagggctttttctggcaccgcagttttgttttaaaactggacctgtatatttgtaaagctatttatgggcccctggcactcttgttcccacaccccaacacttccagcatttagctggccacatggcggagagttttaatttttaacttattgacaaccgagaaggtttatcccgccgatagagggacggccaagaatgtacgtccagcctgccccggagctggaggatcccctccaagcctaaaaggttgttaatagttggaggtgattccagtgaagatattttatttgctttgtcctttttcaggagaattagatttctataggatttttctttaggagatttattttttggacttcaaagcaagctggtattttcatacaaattcttctaattgctgtgtgtcccaggcagggagacggtttccagggaggggccggccctgtgtgcaggttccgatgttattagatgttacaagtttatatatatctatatatataatttattgagtttttacaagatgtatttgttgtagacttaacacttcttacgcaatgcttctagagttttatagcctggactgctacctttcaaagcttggagggaagccgtgaattcagttggttcgttctgtactgttactgggccctgagtctgggcagctgtcccttgcttgcctgcagggccatggctcagggtggtctcttcttggggcccagtgcatggtggccagaggtgtcacccaaaccggcaggtgcgattttgttaacccagcgacgaactttccgaaaaataaagacacctggttgctaacctgaaaaaaaaaaaaaaaaaaaaaaaaaaaaaa

SEQ ID NO: 54 - DNA, 4093 bp, Homo sapiens
cgcgcgctgcctgaggacgccgcggcccccgcccccgccatgggcgcccctgcctgcgccctcgcgctctgcgtggccgtggccatcgtggccggcgcctcctcggagtccttggggacggagcagcgcgtcgtggggcgagcggcagaagtcccgggcccagagcccggccagcaggagcagttggtcttcggcagcggggatgctgtggagctgagctgtcccccgcccgggggtggtcccatggggcccactgtctgggtcaaggatggcacagggctggtgccctcggagcgtgtcctggtggggccccagcggctgcaggtgctgaatgcctcccacgaggactccggggcctacagctgccggcagcggctcacgcagcgcgtactgtgccacttcagtgtgcgggtgacagacgctccatcctcgggagatgacgaagacggggaggacgaggctgaggacacaggtgtggacacaggggccccttactggacacggcccgagcggatggacaagaagctgctggccgtgccggccgccaacaccgtccgcttccgctgcccagccgctggcaaccccactccctccatctcctggctgaagaacggcagggagttccgcggcgagcaccgcattggaggcatcaagctgcggcatcagcagtggagcctggtcatggaaagcgtggtgccctcggaccgcggcaactacacctgcgtcgtggagaacaagtttggcagcatccggcagacgtacacgctggacgtgctggagcgctccccgcaccggcccatcctgcaggcggggctgccggccaaccagacggcggtgctgggcagcgacgtggagttccactgcaaggtgtacagtgacgcacagccccacatccagtggctcaagcacgtggaggtgaacggcagcaaggtgggcccggacggcacaccctacgttaccgtgctcaagacggcgggcgctaacaccaccgacaaggagctagaggttctctccttgcacaacgtcacctttgaggacgccggggagtacacctgcctggcgggcaattctattgggttttctcatcactctgcgtggctggtggtgctgccagccgaggaggagctggtggaggctgacgaggcgggcagtgtgtatgcaggcatcctcagctacggggtgggcttcttcctgttcatcctggtggtggcggctgtgacgctctgccgcctgcgcagcccccccaagaaaggcctgggctcccccaccgtgcacaagatctcccgcttcccgctcaagcgacaggtgtccctggagtccaacgcgtccatgagctccaacacaccactggtgcgcatcgcaaggctgtcctcaggggagggccccacgctggccaatgtctccgagctcgagctgcctgccgaccccaaatgggagctgtctcgggcccggctgaccctgggcaagccccttggggagggctgcttcggccaggtggtcatggcggaggccatcggcattgacaaggaccgggccgccaagcctgtcaccgtagccgtgaagatgctgaaagacgatgccactgacaaggacctgtcggacctggtgtctgagatggagatgatgaagatgatcgggaaacacaaaaacatcatcaacctgctgggcgcctgcacgcagggcgggcccctgtacgtgctggtggagtacgcggccaagggtaacctgcgggagtttctgcgggcgcggcggcccccgggcctggactactccttcgacacctgcaagccgcccgaggagcagctcaccttcaaggacctggtgtcctgtgcctaccaggtggcccggggcatggagtacttggcctcccagaagtgcatccacagggacctggctgcccgcaatgtgctggtgaccgaggacaacgtgatgaagatcgcagacttcgggctggcccgggacgtgcacaacctcgactactacaagaagacaaccaacggccggctgcccgtgaagtggatggcgcctgaggccttgtttgaccgagtctacactcaccagagtgacgtctggtcctttggggtcctgctctgggagatcttcacgctggggggctccccgtaccccggcatccctgtggaggagctcttcaagctgctgaaggagggccaccgcatggacaagcccgccaactgcacacacgacctgtacatgatcatgcgggagtgctggcatgccgcgccctcccagaggcccaccttcaagcagctggtggaggacctggaccgtgtccttaccgtgacgtccaccgacgagtacctggacctgtcggcgcctttcgagcagtactccccgggtggccaggacacccccagctccagctcctcaggggacgactccgtgtttgcccacgacctgctgcccccggccccacccagcagtgggggctcgcggacgtgaagggccactggtccccaacaatgtgaggggtccctagcagccctccctgctgctggtgcacagccactccccggcatgagactcagtgcagatggagagacagctacacagagctttggtctgtgtgtgtgtgtgtgcgtgtgtgtgtgtgtgtgcacatccgcgtgtgcctgtgtgcgtgcgcatcttgcctccaggtgcagaggtaccctgggtgtccccgctgctgtgcaacggtctcctgactggtgctgcagcaccgaggggcctttgttctggggggacccagtgcagaatgtaagtgggcccacccggtgggaccccgtggggcagggagctgggcccgacatggctcggcctctgcctttgcaccacgggacatcacagggtgcgctcggcccctcccacacccaaagctgagcctgcagggaagccccacatgtccagcaccttgtgcctggggtgttagtggcaccgcctccccacctccaggctttcccacttcccaccctgcccctcagagactgaaattacgggtacctgaagatgggagcctttaccttttatgcaaaaggtttattccggaaactagtgtacatttctataaatagatgctgtgtatatggtatatatacatatatatatataacatatatggaagaggaaaaggctggtacaacggaggcctgcgaccctgggggcacaggaggcaggcatggccctgggcggggcgtgggggggcgtggagggaggccccaggggtctcacccatgcaagcagaggaccagggctttttctggcaccgcagttttgttttaaaactggacctgtatatttgtaaagctatttatgggcccctggcactcttgttcccacaccccaacacttccagcatttagctggccacatggcggagagttttaatttttaacttattgacaaccgagaaggtttatcccgccgatagagggacggccaagaatgtacgtccagcctgccccggagctggaggatcccctccaagcctaaaaggttgttaatagttggaggtgattccagtgaagatattttatttgctttgtcctttttcaggagaattagatttctataggatttttctttaggagatttattttttggacttcaaagcaagctggtattttcatacaaattcttctaattgctgtgtgtcccaggcagggagacggtttccagggaggggccggccctgtgtgcaggttccgatgttattagatgttacaagtttatatatatctatatatataatttattgagtttttacaagatgtatttgttgtagacttaacacttcttacgcaatgcttctagagttttatagcctggactgctacctttcaaagcttggagggaagccgtgaattcagttggttcgttctgtactgttactgggccctgagtctgggcagctgtcccttgcttgcctgcagggccatggctcagggtggtctcttcttggggcccagtgcatggtggccagaggtgtcacccaaaccggcaggtgcgattttgttaacccagcgacgaactttccgaaaaataaagacacctggttgctaacctgaaaaaaaaaaaaaaaaaaaaaaaaaaaaaa

SEQ ID NO: 55 - DNA, 2184 bp, Homo sapiens
cgcgcgctgcctgaggacgccgcggcccccgcccccgccatgggcgcccctgcctgcgccctcgcgctctgcgtggccgtggccatcgtggccggcgcctcctcggagtccttggggacggagcagcgcgtcgtggggcgagcggcagaagtcccgggcccagagcccggccagcaggagcagttggtcttcggcagcggggatgctgtggagctgagctgtcccccgcccgggggtggtcccatggggcccactgtctgggtcaaggatggcacagggctggtgccctcggagcgtgtcctggtggggccccagcggctgcaggtgctgaatgcctcccacgaggactccggggcctacagctgccggcagcggctcacgcagcgcgtactgtgccacttcagtgtgcgggtgacagacgctccatcctcgggagatgacgaagacggggaggacgaggctgaggacacaggtgtggacacaggggccccttactggacacggcccgagcggatggacaagaagctgctggccgtgccggccgccaacaccgtccgcttccgctgcccagccgctggcaaccccactccctccatctcctggctgaagaacggcagggagttccgcggcgagcaccgcattggaggcatcaagctgcggcatcagcagtggagcctggtcatggaaagcgtggtgccctcggaccgcggcaactacacctgcgtcgtggagaacaagtttggcagcatccggcagacgtacacgctggacgtgctggagcgctccccgcaccggcccatcctgcaggcggggctgccggccaaccagacggcggtgctgggcagcgacgtggagttccactgcaaggtgtacagtgacgcacagccccacatccagtggctcaagcacgtggaggtgaacggcagcaaggtgggcccggacggcacaccctacgttaccgtgctcaaggtgtccctggagtccaacgcgtccatgagctccaacacaccactggtgcgcatcgcaaggctgtcctcaggggagggccccacgctggccaatgtctccgagctcgagctgcctgccgaccccaaatgggagctgtctcgggcccggctgaccctgggcaagccccttggggagggctgcttcggccaggtggtcatggcggaggccatcggcattgacaaggaccgggccgccaagcctgtcaccgtagccgtgaagatgctgaaagacgatgccactgacaaggacctgtcggacctggtgtctgagatggagatgatgaagatgatcgggaaacacaaaaacatcatcaacctgctgggcgcctgcacgcagggcgggcccctgtacgtgctggtggagtacgcggccaagggtaacctgcgggagtttctgcgggcgcggcggcccccgggcctggactactccttcgacacctgcaagccgcccgaggagcagctcaccttcaaggacctggtgtcctgtgcctaccaggtggcccggggcatggagtacttggcctcccagaagtgcatccacagggacctggctgcccgcaatgtgctggtgaccgaggacaacgtgatgaagatcgcagacttcgggctggcccgggacgtgcacaacctcgactactacaagaagacaaccaacggccggctgcccgtgaagtggatggcgcctgaggccttgtttgaccgagtctacactcaccagagtgacgtctggtcctttggggtcctgctctgggagatcttcacgctggggggctccccgtaccccggcatccctgtggaggagctcttcaagctgctgaaggagggccaccgcatggacaagcccgccaactgcacacacgacctgtacatgatcatgcgggagtgctggcatgccgcgccctcccagaggcccaccttcaagcagctggtggaggacctggaccgtgtccttaccgtgacgtccaccgacgagtacctggacctgtcggcgcctttcgagcagtactccccgggtggccaggacacccccagctccagctcctcaggggacgactccgtgtttgcccacgacctgctgcccccggccccacccagcagtgggggctcgcggacgtgaagggccactggtccccaacaatgtgaggggtccctagcagccctccctgctgctggtgca

SEQ ID NO: 56 - DNA, 2520 bp, Homo sapiens
cgcgcgctgcctgaggacgccgcggcccccgcccccgccatgggcgcccctgcctgcgccctcgcgctctgcgtggccgtggccatcgtggccggcgcctcctcggagtccttggggacggagcagcgcgtcgtggggcgagcggcagaagtcccgggcccagagcccggccagcaggagcagttggtcttcggcagcggggatgctgtggagctgagctgtcccccgcccgggggtggtcccatggggcccactgtctgggtcaaggatggcacagggctggtgccctcggagcgtgtcctggtggggccccagcggctgcaggtgctgaatgcctcccacgaggactccggggcctacagctgccggcagcggctcacgcagcgcgtactgtgccacttcagtgtgcgggtgacagacgctccatcctcgggagatgacgaagacggggaggacgaggctgaggacacaggtgtggacacaggggccccttactggacacggcccgagcggatggacaagaagctgctggccgtgccggccgccaacaccgtccgcttccgctgcccagccgctggcaaccccactccctccatctcctggctgaagaacggcagggagttccgcggcgagcaccgcattggaggcatcaagctgcggcatcagcagtggagcctggtcatggaaagcgtggtgccctcggaccgcggcaactacacctgcgtcgtggagaacaagtttggcagcatccggcagacgtacacgctggacgtgctggagcgctccccgcaccggcccatcctgcaggcggggctgccggccaaccagacggcggtgctgggcagcgacgtggagttccactgcaaggtgtacagtgacgcacagccccacatccagtggctcaagcacgtggaggtgaacggcagcaaggtgggcccggacggcacaccctacgttaccgtgctcaagacggcgggcgctaacaccaccgacaaggagctagaggttctctccttgcacaacgtcacctttgaggacgccggggagtacacctgcctggcgggcaattctattgggttttctcatcactctgcgtggctggtggtgctgccagccgaggaggagctggtggaggctgacgaggcgggcagtgtgtatgcaggcatcctcagctacggggtgggcttcttcctgttcatcctggtggtggcggctgtgacgctctgccgcctgcgcagcccccccaagaaaggcctgggctcccccaccgtgcacaagatctcccgcttcccgctcaagcgacaggtgtccctggagtccaacgcgtccatgagctccaacacaccactggtgcgcatcgcaaggctgtcctcaggggagggccccacgctggccaatgtctccgagctcgagctgcctgccgaccccaaatgggagctgtctcgggcccggctgaccctgggcaagccccttggggagggctgcttcggccaggtggtcatggcggaggccatcggcattgacaaggaccgggccgccaagcctgtcaccgtagccgtgaagatgctgaaagacgatgccactgacaaggacctgtcggacctggtgtctgagatggagatgatgaagatgatcgggaaacacaaaaacatcatcaacctgctgggcgcctgcacgcagggcgggcccctgtacgtgctggtggagtacgcggccaagggtaacctgcgggagtttctgcgggcgcggcggcccccgggcctggactactccttcgacacctgcaagccgcccgaggagcagctcaccttcaaggacctggtgtcctgtgcctaccaggtggcccggggcatggagtacttggcctcccagaagtgcatccacagggacctggctgcccgcaatgtgctggtgaccgaggacaacgtgatgaagatcgcagacttcgggctggcccgggacgtgcacaacctcgactactacaagaagacaaccaacggccggctgcccgtgaagtggatggcgcctgaggccttgtttgaccgagtctacactcaccagagtgacgtctggtcctttggggtcctgctctgggagatcttcacgctggggggctccccgtaccccggcatccctgtggaggagctcttcaagctgctgaaggagggccaccgcatggacaagcccgccaactgcacacacgacctgtacatgatcatgcgggagtgctggcatgccgcgccctcccagaggcccaccttcaagcagctggtggaggacctggaccgtgtccttaccgtgacgtccaccgacgagtacctggacctgtcggcgcctttcgagcagtactccccgggtggccaggacacccccagctccagctcctcaggggacgactccgtgtttgcccacgacctgctgcccccggccccacccagcagtgggggctcgcggacgtgaagggccactggtccccaacaatgtgaggggtccctagcagccctccctgctgctggtgca

SEQ ID NO: 57 - DNA, 525 bp, Homo sapiens
gagtacctggacctgtcggcgcctttcgagcagtactccccgggtggccaggacacccccagctccagctcctcaggggacgactccgtgtttgcccacgacctgctggccactggtccccaacaatgtgaggggtccctagcagcccaccctgctgctggtgcacagccactccccggcatgagactcagtgcagatggagagacagctacacagagctttggtctgtgtgtgtgtgtgtgcgtgtgtgtgtgtgtgtgcacatccgcgtgtgcctgtgtgcgtgcgcatcttgcctccaggtgcagaggtaccctgggtgtccccgctgctgtgcaacggtctcctgactggtgctgcagcaccgaggggcctttgttctggggggacccagtgcagaatgtaagtgggcccacccggtgggaccccgtggggcagggagctgggcccgacatggctcggcctctgcctttgcaccacgggacatcacagggtgcgctcggcccctcccacacccaaagctga

SEQ ID NO: 58 - DNA, 3757 bp, Homo sapiens
cgcgcgctgcctgaggacgccgcggcccccgcccccgccatgggcgcccctgcctgcgccctcgcgctctgcgtggccgtggccatcgtggccggcgcctcctcggagtccttggggacggagcagcgcgtcgtggggcgagcggcagaagtcccgggcccagagcccggccagcaggagcagttggtcttcggcagcggggatgctgtggagctgagctgtcccccgcccgggggtggtcccatggggcccactgtctgggtcaaggatggcacagggctggtgccctcggagcgtgtcctggtggggccccagcggctgcaggtgctgaatgcctcccacgaggactccggggcctacagctgccggcagcggctcacgcagcgcgtactgtgccacttcagtgtgcgggtgacagacgctccatcctcgggagatgacgaagacggggaggacgaggctgaggacacaggtgtggacacaggggccccttactggacacggcccgagcggatggacaagaagctgctggccgtgccggccgccaacaccgtccgcttccgctgcccagccgctggcaaccccactccctccatctcctggctgaagaacggcagggagttccgcggcgagcaccgcattggaggcatcaagctgcggcatcagcagtggagcctggtcatggaaagcgtggtgccctcggaccgcggcaactacacctgcgtcgtggagaacaagtttggcagcatccggcagacgtacacgctggacgtgctggagcgctccccgcaccggcccatcctgcaggcggggctgccggccaaccagacggcggtgctgggcagcgacgtggagttccactgcaaggtgtacagtgacgcacagccccacatccagtggctcaagcacgtggaggtgaacggcagcaaggtgggcccggacggcacaccctacgttaccgtgctcaaggtgtccctggagtccaacgcgtccatgagctccaacacaccactggtgcgcatcgcaaggctgtcctcaggggagggccccacgctggccaatgtctccgagctcgagctgcctgccgaccccaaatgggagctgtctcgggcccggctgaccctgggcaagccccttggggagggctgcttcggccaggtggtcatggcggaggccatcggcattgacaaggaccgggccgccaagcctgtcaccgtagccgtgaagatgctgaaagacgatgccactgacaaggacctgtcggacctggtgtctgagatggagatgatgaagatgatcgggaaacacaaaaacatcatcaacctgctgggcgcctgcacgcagggcgggcccctgtacgtgctggtggagtacgcggccaagggtaacctgcgggagtttctgcgggcgcggcggcccccgggcctggactactccttcgacacctgcaagccgcccgaggagcagctcaccttcaaggacctggtgtcctgtgcctaccaggtggcccggggcatggagtacttggcctcccagaagtgcatccacagggacctggctgcccgcaatgtgctggtgaccgaggacaacgtgatgaagatcgcagacttcgggctggcccgggacgtgcacaacctcgactactacaagaagacaaccaacggccggctgcccgtgaagtggatggcgcctgaggccttgtttgaccgagtctacactcaccagagtgacgtctggtcctttggggtcctgctctgggagatcttcacgctggggggctccccgtaccccggcatccctgtggaggagctcttcaagctgctgaaggagggccaccgcatggacaagcccgccaactgcacacacgacctgtacatgatcatgcgggagtgctggcatgccgcgccctcccagaggcccaccttcaagcagctggtggaggacctggaccgtgtccttaccgtgacgtccaccgacgagtacctggacctgtcggcgcctttcgagcagtactccccgggtggccaggacacccccagctccagctcctcaggggacgactccgtgtttgcccacgacctgctgcccccggccccacccagcagtgggggctcgcggacgtgaagggccactggtccccaacaatgtgaggggtccctagcagccctccctgctgctggtgcacagccactccccggcatgagactcagtgcagatggagagacagctacacagagctttggtctgtgtgtgtgtgtgtgcgtgtgtgtgtgtgtgtgcacatccgcgtgtgcctgtgtgcgtgcgcatcttgcctccaggtgcagaggtaccctgggtgtccccgctgctgtgcaacggtctcctgactggtgctgcagcaccgaggggcctttgttctggggggacccagtgcagaatgtaagtgggcccacccggtgggaccccgtggggcagggagctgggcccgacatggctcggcctctgcctttgcaccacgggacatcacagggtgcgctcggcccctcccacacccaaagctgagcctgcagggaagccccacatgtccagcaccttgtgcctggggtgttagtggcaccgcctccccacctccaggctttcccacttcccaccctgcccctcagagactgaaattacgggtacctgaagatgggagcctttaccttttatgcaaaaggtttattccggaaactagtgtacatttctataaatagatgctgtgtatatggtatatatacatatatatatataacatatatggaagaggaaaaggctggtacaacggaggcctgcgaccctgggggcacaggaggcaggcatggccctgggcggggcgtgggggggcgtggagggaggccccaggggtctcacccatgcaagcagaggaccagggctttttctggcaccgcagttttgttttaaaactggacctgtatatttgtaaagctatttatgggcccctggcactcttgttcccacaccccaacacttccagcatttagctggccacatggcggagagttttaatttttaacttattgacaaccgagaaggtttatcccgccgatagagggacggccaagaatgtacgtccagcctgccccggagctggaggatcccctccaagcctaaaaggttgttaatagttggaggtgattccagtgaagatattttatttgctttgtcctttttcaggagaattagatttctataggatttttctttaggagatttattttttggacttcaaagcaagctggtattttcatacaaattcttctaattgctgtgtgtcccaggcagggagacggtttccagggaggggccggccctgtgtgcaggttccgatgttattagatgttacaagtttatatatatctatatatataatttattgagtttttacaagatgtatttgttgtagacttaacacttcttacgcaatgcttctagagttttatagcctggactgctacctttcaaagcttggagggaagccgtgaattcagttggttcgttctgtactgttactgggccctgagtctgggcagctgtcccttgcttgcctgcagggccatggctcagggtggtctcttcttggggcccagtgcatggtggccagaggtgtcacccaaaccggcaggtgcgattttgttaacccagcgacgaactttccgaaaaataaagacacctggttgctaacctgaaaaaaaaaaaaaaaaaaaaaaaaaaaaaa

SEQ ID NO: 59 - DNA, 336 bp, Homo sapiens
aaccccactccctccatctcctggctgaagaacggcagggagttccgcggcgagcaccgcattggaggcatcaagctgcggcatcagcagtggagcctggtcatggaaagcgtggtgccctcggaccgcggcaactacacctgcgtcgtggagaacaagtttggcagcatccggcagacgtacacgctggacgtgctggagcgctccccgcaccggcccatcctgcaggcggggctgccggccaaccagacggcggtgctgggcagcgacgtggagttccactgcaagacggcgggcgctaacaccaccgacaaggagctagaggttctctccttg

SEQ ID NO: 60 - DNA, 375 bp, Homo sapiens
aaccccactccctccatctcctggctgaagaacggcagggagttccgcggcgagcaccgcattggaggcatcaagctgcggcatcagcagtggagcctggtcatggaaagcgtggtgccctcggaccgcggcaactacacctgcgtcgtggagaacaagtttggcagcatccggcagacgtacacgctggacgtgctggagcgctccccgcaccggcccatcctgcaggcggggctgccggccaaccagacggcggtgctgggcagcgacgtggagttccactgcaaggtgtacagtgacgcacagccccacatccagtggctcaagacggcgggcgctaacaccaccgacaaggagctagaggttctctccttg

SEQ ID NO: 61 - DNA, 399 bp, Homo sapiens
aaccccactccctccatctcctggctgaagaacggcagggagttccgcggcgagcaccgcattggaggcatcaagctgcggcatcagcagtggagcctggtcatggaaagcgtggtgccctcggaccgcggcaactacacctgcgtcgtggagaacaagtttggcagcatccggcagacgtacacgctggacgtgctggagcgctccccgcaccggcccatcctgcaggcggggctgccggccaaccagacggcggtgctgggcagcgacgtggagttccactgcaaggtgtacagtgacgcacagccccacatccagtggctcaagcacgtggaggtgaacggcagcaagacggcgggcgctaacaccaccgacaaggagctagaggttctctccttg

SEQ ID NO: 62 - DNA, 151 bp, Homo sapiens
tcctggatcagtgagagtgtggaggccgacgtgcgcctccgcctggccaatgtgtcggagcgggacgggggcgagtacctctgtcgagccaccaatttcataggcgtggccgagaaggccttttggctgagcgttcacgggccccgagcag

SEQ ID NO: 63 - DNA, 1583 bp, Homo sapiens
ggcacgaggctctcgagcgtcctcagcgcagccgccgcccgcggagccagcacgaacgagcccagcaccggccggatggagcgtccgcaacccgacagcatgccccaggatttgtcagaggccctgaaggaggccaccaaggaggtgcacacccaggcagagaatgctgagttcatgaggaactttcagaagggccaggtgacccgagacggcttcaagctggtgatggcctccctgtaccacatctatgtggccctggaggaggagattgagcgcaacaaggagagcccagtcttcgcccctgtctacttcccagaagagctgcaccgcaaggctgccctggagcaggacctggccttctggtacgggccccgctggcaggaggtcatcccctacacaccagccatgcagcactatgtgaagcggctccacgaggtggggcgcacagagcccgagctgctggtggcccacgcctacacccgctacctgggtgacctgtctgggggccaggtgctcaaaaagattgcccagaaagccctggacctgcccagctctggcgagggcctggccttcttcaccttccccaacattgccagtgccaccaagttcaagcagctctaccgctcccgcatgaactccctggagatgactcccgcagtcaggcagagggtgatagaagaggccaagactgcgttcctgctcaacatccagctctttgaggagttgcaggagctgctgacccatgacaccaaggaccagagcccctcacgggcaccagggcttcgccagcgggccagcaacaaagtgcaagattctgcccccgtggagactcccagagggaagcccccactcaacacccgctcccaggctccgcttctccgatgggtccttacactcagctttctggtggcgacagttgctgtagggctttatgccatgtgaatgcaggcatgctggctcccagggccatgaactttgtccggtggaaggccttctttctagagagggaattctcttggctggcttccttaccgtgggcactgaaggctttcagggcctccagccctctcactgtgtccctctctctggaaaggaggaaggagcctatggcatcttccccaacgaaaagcacatccaggcaatggcctaaacttcagagggggcgaagggatcagccctgcccttcagcatcctcagttcctgcagcagagcctggaagacaccctaatgtggcagctgtctcaaacctccaaaagccctgagtttcaagtatccttgttgacacggccatgaccactttccccgtgggccatggcaatttttacacaaacctgaaaagatgttgtgtcttgtgtttttgtcttatttttgttggagccactctgttcctggctcagcctcaaatgcagtatttttgttgtgttctgttgtttttatagcagggttggggtggttttttgagccatgcgtgggtggggagggaggtgtttaacggcactgtggccttggtctaacttttgtgtgaaataataaacaacattgtctgatagtaaaaaaaaaaaaaaaaaaaaaaaaaaaaaaaa

SEQ ID NO: 64 - DNA, 1550 bp, Homo sapiens
tcaacgcctgcctcccctcgagcgtcctcagcgcagccgccgcccgcggagccagcacgaacgagcccagcaccggccggatggagcgtccgcaacccgacagcatgccccaggatttgtcagaggccctgaaggaggccaccaaggaggtgcacacccaggcagagaatgctgagttcatgaggaactttcagaagggccaggtgacccgagacggcttcaagctggtgatggcctccctgtaccacatctatgtggccctggaggaggagattgagcgcaacaaggagagcccagtcttcgcccctgtctacttcccagaagagctgcaccgcaaggctgccctggagcaggacctggccttctggtacgggccccgctggcaggaggtcatcccctacacaccagccatgcagcgctatgtgaagcggctccacgaggtggggcgcacagagcccgagctgctggtggcccacgcctacacccgctacctgggtgacctgtctgggggccaggtgctcaaaaagattgcccagaaagccctggacctgcccagctctggcgagggcctggccttcttcaccttccccaacattgccagtgccaccaagttcaagcagctctaccgctcccgcatgaactccctggagatgactcccgcagtcaggcagagggtgatagaagaggccaagactgcgttcctgctcaacatccagctctttgaggagttgcaggagctgctgacccatgacaccaaggaccagagcccctcacgggcaccagggcttcgccagcgggccagcaacaaagtgcaagattctgcccccgtggagactcccagagggaagcccccactcaacacccgctcccaggctccgcttctccgatgggtccttacactcagctttctggtggcgacagttgctgtagggctttatgccatgtgaatgcaggcatgctggctcccagggccatgaactttgtccggtggaaggccttctttctagagagggaattctcttggctggcttccttaccgtgggcactgaaggctttcagggcctccagccctctcactgtgtccctctctctggaaaggaggaaggagcctatggcatcttccccaacgaaaagcacatccaggcaatggcctaaacttcagagggggcgaaggggtcagccctgcccttcagcatcctcagttcctgcagcagagcctggaagacaccctaatgtggcagctgtctcaaacctccaaaagccctgagtttcaagtatccttgttgacacggccatgaccactttccccgtgggccatggcaatttttacacaaacctgaaaagatgttgtgtcttgtgtttttgtcttatttttgttggagccactctgttcctggctcagcctcaaatgcagtatttttgttgtgttctgttgtttttatagcagggttggggtggtttttgagccatgcgtgggtggggagggaggtgtttaacggcactgtggccttggtctaacttttgtgtgaaataataaacaacattgtctg

SEQ ID NO: 65 - DNA, 630 bp, Homo sapiens
  misc_feature (581)..(586): "n" = "a", "g", "c", or "t"
acatgcccaggatttgtcagaggccctgaaaggaggccaccaaggaggtgcacacccaggcaagagaatgctgagttcatgaggaactttcagaagggccaggtgacccgagacggcttcaagctggtgatggcctccctgtaccacatctatgtggccctggaggaggagattgagcgcaacaaggagagcccagtcttcgcccctgtctacttcccagaagagctgcaccgcaaggctgccctggagcaggacctggccttctggtacgggccccgctggcaggaggtcatcccctacacaccagccatgcagcgctatgtgaagcggctccaccaggtggggcgcacagagcccgagctgctggtggcccacgcctacacccgctacctgggtgacctgtctgggggccaggtgctcaaaaagattgcccagaaagccctggacctgcccagctctggcgagggcctggccttcttcaccttccccaacattgccagtgccaccaagttcaagcaagctctaccgctcccgcatgaactccctggagatgactcccgcagtcaggcagagggtgatanaagangccaagactgcgttcctgctcaacatccagctctttgaggagtt

SEQ ID NO: 66 - DNA, 509 bp, Homo sapiens
tgaaggctttcagggcctccagccctctcactgtgtccctctctctggaaaggaggaaggagcctatggcatcttccccaacgaaaagcacatccaggcaatggcctaaacttcagagggggcgaagggatcagccctgcccttcagcatcctcagttcctgcagcagagcctggaagacaccctaatgtggcagctgtctcaaacctccaaaagccctgagtttcaagtatccttgttgacacggccatgaccactttccccgtgggccatggcaatttttacacaaacctgaaaagatgttgtgtcttgtgtttttgtcttatttttgttggacccactctgttcctggctcagcctcaaatgcagtatttttgttgtgttctgttgtttttatagcagggttggggtggtttttgagccatgcgtgggtggggagggaggtgtttaacggcactgtggccttggtctaacttttgtgtgaaataataaacaacattgtctgatagt

SEQ ID NO: 67 - DNA, 1550 bp, Homo sapiens; identical to SEQ ID NO: 64

SEQ ID NO: 68 - DNA, 1309 bp, Homo sapiens
atgtgtcactctcgcagctgccacccgaccatgaccatcctgcaggccccgaccccggccccctccaccatcccgggaccccggcggggctccggtcctgagatcttcaccttcgaccctctcccggagcccgcagcggcccctgccgggcgccccagcgcctctcgcgggcaccgaaagcgcagccgcagggtctctctaccctcgagtggtgagtatcgccgaagtgggcattcgcggtgtgcgctgccctggagtcactggggaacgacccgactccagagcctcgacctgacctgtctcctgttttgtctccccttagtccggcgccagctgccagtcgaggaaccgaacccagccaaaaggcttctctttctgctgctcaccatcgtcttctgccagatcctgatggctgaagagggtgtgccggcgcccctgcctccagaggacgcccctaacgccgcatccctggcgcccacccctgtgtcccccgtcctcgagccctttaatctgacttcggagccctcggactacgctctggacctcagcactttcctccagcaacacccggccgccttctaactgtgactccccgcactccccaaaaagaatccgaaaaaccacaaagaaacaccaggcgtacctggtgcgcgagagcgtatccccaactgggacttccgaggcaacttgaactcagaacactacagcggagacgccacccggtgcttgaggcgggaccgaggcgcacagagaccgaggcgcatagagaccgaggcacagcccagctgggctaggccggtgggaaggagagcgtcgttaatttatttcttattgctcctaattaatatttatatgtatttatgtacgtcctcctaggtgatggagatgtgtacgtaatatttattttaacttatgcaagggtgtgagatgttccctctgctgtaaatgcaggtctcttggtatttattgagctttgtgggactggtggaagcaggacacctggaactgcggcaaagtaggagaagaaatggggaggactcgggtgggggaggacgtcccggctgggatgaagtctggtggtgggtcgtaagtttaggaggtgactgcatcctccagcatctcaactccgtctgtctactgtgtgagacttcggcggaccattaggaatgagatccgtgagatccttccatcttcttgaagtcgcctttagggtggctgcgaggtagagggttgggggttggtgggctgtcacggagcgactgtcgagatcgcctagtatgttctgtgaacacaaataaaattgatttac

SEQ ID NO: 69 - DNA, 477 bp, Homo sapiens
ctcaccatgtgtcactctcgcagctgccacccgaccatgaccatcctgcaggccccgaccccggccccctccaccatcccgggaccccggcggggctccggtcctgagatcttcaccttcgaccctctcccggagcccgcagcggcccctgccgggcgccccagcgcctctcgcgggcaccgaaagcgcagccgcagggttctctaccctcgagtggtccggcgccagctgccagtcgaggaaccgaacccagccaaaaggcttctctttctgctgctcaccatcgtcttctgccagatcctgatggctgaagagggtgtgccggcgcccctgcctccagaggacgcccctaacgccgcatccctggcgcccacccctgtgtcccccgtcctcgagccctttaatctgacttcggagccctcggactacgctctggacctcagcactttcctccagcaacacccggccgccttctaa

SEQ ID NO: 70 - DNA, 1236 bp, Homo sapiens
acttggccttacactccgctcggctcaccatgtgtcactctcgcagctgccacccgaccatgaccatcctgcaggccccgaccccggccccctccaccatcccgggaccccggcggggctccggtcctgagatcttcaccttcgaccctctcccggagcccgcagcggcccctgccgggcgccccagcgcctctcgcgggcaccgaaagcgcagccgcagggttctctaccctcgagtggtccggcgccagctgccagtcgaggaaccgaacccagccaaaaggcttctctttctgctgctcaccatcgtcttctgccagatcctgatggctgaagagggtgtgccggcgcccctgcctccagaggacgcccctaacgccgcatccctggcgcccacccctgtgtcccccgtcctcgagccctttaatctgacttcggagccctcggactacgctctggacctcagcactttcctccagcaacacccggccgccttctaactgtgactccccgcactccccaaaaagaatccgaaaaaccacaaagaaacaccaggcgtacctggtgcgcgagagcgtatccccaactgggacttccgaggcaacttgaactcagaacactacagcggagacgccacccggtgcttgaggcgggaccgaggcgcacagagaccgaggcgcatagagaccgaggcacagcccagctggggctaggcccggtgggaaggagagcgtcgttaatttatttcttattgctcctaattaatatttatatgtatttatgtacgtcctcctaggtgatggagatgtgtacgtaatatttattttaacttatgcaagggtgtgagatgttccccctgctgtaaatgcaggtctcttggtatttattgagctttgtgggactggtggaagcaggacacctggaactgcggcaaagtaggagaagaaatggggaggactcgggtgggggaggacgtcccggctgggatgaagtctggtggtgggtcgtaagtttaggaggtgactgcatcctccagcatctcaactccgtctgtctactgtgtgagacttcggcggaccattaggaatgagatccgtgagatccttccatcttcttgaagtcgcctttagggtggctacgaggtagaggggtgggggttggtgggctgtcacggagcgactgtcgagatcgcctagtatgttctgtgaacacaaataaaattgatttactgtctgc

SEQ ID NO: 71 - DNA, 1250 bp, Homo sapiens
cggacgcgtgggctccgctcggctcaccatgtgtcactctcgcagctgccacccgaccatgaccatcctgcaggccccgaccccggccccctccaccatcccgggaccccggcggggctccggtcctgagatcttcaccttcgaccctctcccggagcccgcagcggcccctgccgggcgccccagcgcctctcgcgggcaccgaaagcgcagccgcagggttctctaccctcgagtggtccggcgccagctgccagtcgaggaaccgaacccagccaaaaggcttctctttctgctgctcaccatcgtcttctgccagatcctgatggctgaagagggtgtgccggcgcccctgcctccagaggacgcccctaacgccgcatccctggcgcccacccctgtgtcccccgtcctcgagccctttaatctgacttcggagccctcggactacgctctggacctcagcactttcctccagcaacacccggccgccttctaactgtgactccccgcactccccaaaaagaatccgaaaaaccacaaagaaacaccaggcgtacctggtgcgcgagagcgtatccccaactgggacttccgaggcaacttgaactcagaacactacagcggagacgccacccggtgcttgaggcgggaccgaggcgcacagagaccgaggcgcatagagaccgaggcacagcccagctggggctaggcccggtgggaaggagagcgtcgttaatttatttcttattgctcctaattaatatttatatgtatttatgtacgtcctcctaggtgatggagatgtgtacgtaatatttattttaacttatgcaagggtgtgagatgttccccctgctgtaaatgcaggtctcttggtatttattgagctttgtgggactggtggaagcaggacacctggaactgcggcaaagtaggagaagaaatggggaggactcgggtgggggaggacgtcccggctgggatgaagtctggtggtgggtcgtaagtttaggaggtgactgcatcctccagcatctcaactccgtctgtctactgtgtgagacttcggcggaccattaggaatgagatccgtgagatccttccatcttcttgaagtcgcctttagggtggctgcgaggtagagggttgggggttggtgggctgtcacggagcgactgtcgagatcgcctagtatgttctgtgaacacaaataaaattgatttactgtctgcaaaaaaaaaaaaaaa

SEQ ID NO: 72 - DNA, 1240 bp, Homo sapiens
cactccgctcggctcaccatgtgtcactctcgcagctgccacccgaccatgaccatcctgcaggccccgaccccggccccctccaccatcccgggaccccggcggggctccggtcctgagatcttcaccttcgaccctctcccggagcccgcagcggcccctgccgggcgccccagcgcctctcgcgggcaccgaaagcgcagccgcagggttctctaccctcgagtggtccggcgccagctgccagtcgaggaaccgaacccagccaaaaggcttctctttctgctgctcaccatcgtcttctgccagatcctgatggctgaagagggtgtgccggcgcccctgcctccagaggacgcccctaacgccgcatccctggcgcccacccctgtgtcccccgtcctcgagccctttaatctgacttcggagccctcggactacgctctggacctcagcactttcctccagcaacacccggccgccttctaactgtgactccccgcactccccaaaaagaatccgaaaaaccacaaagaaacaccaggcgtacctggtgcgcgagagcgtatccccaactgggacttccgaggcaacttgaactcagaacactacagcggagacgccacccggtgcttgaggcgggaccgaggcgcacagagaccgaggcgcatagagaccgaggcacagcccagctggggctaggcccggtgggaaggagagcgtcgttaatttatttcttattgctcctaattaatatttatatgtatttatgtacgtcctcctaggtgatggagatgtgtacgtaatatttattttaacttatgcaagggtgtgagatgttccccctgctgtaaatgcaggtctcttggtatttattgagctttgtgggactggtggaagcaggacacctggaactgcggcaaagtaggagaagaaatggggaggactcgggtgggggaggacgtcccggctgggatgaagtctggtggtgggtcgtaagtttaggaggtgactgcatcctccagcatctcaactccgtctgtctactgtgtgagacttcggcggaccattaggaatgagatccgtgagatccttccatcttcttgaagtcgcctttagggtggctgcgaggtagagggttgggggttggtgggctgtcacggagcgactgtcgagatcgcctagtatgttctgtgaacacaaataaaattgatttactgtcaaaaaaaaaaaaaaaaaa

SEQ ID NO: 73 - DNA, 1345 bp, Homo sapiens
acttggccttacactccgctcggctcaccatgtgtcactctcgcagctgccacccgaccatgaccatcctgcaggccccgaccccggccccctccaccatcccgggaccccggcggggctccggtcctgagatcttcaccttcgaccctctcccggagcccgcagcggcccctgccgggcgccccagcgcctctcgcgggcaccgaaagcgcagccgcagggtctctctaccctcgagtggtgagtatcgccgaagtgggcattcgcggtgtgcgctgccctggagtcactggggaacgacccgactccagagcctcgacctgacctgtctcctgttttgtctccccttagtccggcgccagctgccagtcgaggaaccgaacccagccaaaaggcttctctttctgctgctcaccatcgtcttctgccagatcctgatggctgaagagggtgtgccggcgcccctgcctccagaggacgcccctaacgccgcatccctggcgcccacccctgtgtcccccgtcctcgagccctttaatctgacttcggagccctcggactacgctctggacctcagcactttcctccagcaacacccggccgccttctaactgtgactccccgcactccccaaaaagaatccgaaaaaccacaaagaaacaccaggcgtacctggtgcgcgagagcgtatccccaactgggacttccgaggcaacttgaactcagaacactacagcggagacgccacccggtgcttgaggcgggaccgaggcgcacagagaccgaggcgcatagagaccgaggcacagcccagctgggctaggccggtgggaaggagagcgtcgttaatttatttcttattgctcctaattaatatttatatgtatttatgtacgtcctcctaggtgatggagatgtgtacgtaatatttattttaacttatgcaagggtgtgagatgttccctctgctgtaaatgcaggtctcttggtatttattgagctttgtgggactggtggaagcaggacacctggaactgcggcaaagtaggagaagaaatggggaggactcgggtgggggaggacgtcccggctgggatgaagtctggtggtgggtcgtaagtttaggaggtgactgcatcctccagcatctcaactccgtctgtctactgtgtgagacttcggcggaccattaggaatgagatccgtgagatccttccatcttcttgaagtcgcctttagggtggctgcgaggtagagggttgggggttggtgggctgtcacggagcgactgtcgagatcgcctagtatgttctgtgaacacaaataaaattgatttactgtctgc

SEQ ID NO: 74 - DNA, 1223 bp, Homo sapiens
acactcgctcggctcaccatgtgtcactctcgcagctgccacccgaccatgaccatcctgcaggccccgaccccggccccctccaccatcccgggaccccggcggggctccggtcctgagatcttcaccttcgaccctctcccggagcccgcagcggcccctgccgggcgccccagcggctctcgcgggcaccgaaagcgcagccgcagggttctctaccctcgagtggtccggcgccagctgccagtcgaggaaccgaacccagccaaaaggcttctctttctgctgctcaccatcgtcttctgccagatcctgatggctgaagagggtgtgcgggcgcccctgcctccagaggacgcccctaacgccgcatccctggcgcccacccctgtgtcccccgtcctcgagccctttaatctgacttcggagccctcggactacgctctggacctcagcactttcctccagcaacacccggccgccttctaactgtgactccccgcactccccaaaaagaatccgaaaaaccacaaagaaacaccaggcgtacctggtgcgcgagagcgtatccccaactgggacttccgaggcaacttgaactcagaacactacagcggagacgccacccggtgcttgaggcgggaccgaggcgcacagagaccgaggcgcatagagaccgagcacagcccagctgggctaggcccggtgggaaggagagcgtcgttaatttatttcttattgctcctaattaatatttatatgtatttatgtacgtcctcctaggtgatgagatgtgtacgtaatatttattttaacttatgcaagggtgtgagatgttccccctgctgtaaatgcaggtctcttggtatttattgagctttgtgggactggtggaagcaggacacctggaactgcggcaaagtaggagaagaaatggggaggactcgggtgggggaggacgtcccggctgggatgaagtctggtggtgggtcgtaagtttaggaggtgactgcatcctccagcattctcaactccgtctgtctactgtgtgagacttcggcggaccattaggaatgagatccgtgagatccttccatcttcttgaagtcgcctttagggtggctgcgaggtagagggttgggggttggtgggctgtcacggagcgactgtcgagatcgcctagtatgttctgtgaacacaaataaaattgatttactgtctgc

SEQ ID NO: 75 - DNA, 343 bp, Homo sapiens
  misc_feature (237)..(303): "n" = "a", "g", "c", or "t"
gctttgtgggactggtggaagcaggaccctggaactgcggcaaagtaggagaagaatggggaggactcgggtgggggaggacgtcccggctgggatgaagtctggtggtgggtcgtaagttaggaggtgactgcatcctccagcatctcaactccgtctgtctactgtgtgagacttcggcggaccattaggaatgagatccgtgagatccttccatcttcttgaagtcgcctttanggtggctgcgangtanagggttgggggttggtgggctgtcacngagcgactatcgacatcgcctantatgttctgtgaacacaaataaaattgatttactgtctgc

SEQ ID NO: 76 - DNA, 1230 bp, Homo sapiens
ctcggctcaccatgtgtcactctcgcagctgccacccgaccatgaccatcctgcaggccccgaccccggccccctccaccatcccgggaccccggcggggctccggtcctgagatcttcaccttcgaccctctcccggagcccgcagcggcccctgccgggcgccccagcgcctctcgcgggcaccgaaagcgcagccgcagggttctctaccctcgagtggtccggcgccagctgccagtcgaggaaccgaacccagccaaaaggcttctctttctgctgctcaccatcgtcttctgccagatcctgatggctgaagagggtgtgccggcgcccctgcctccagaggacgcccctaacgccgcatccctggcgcccacccctgtgtcccccgtcctcgagccctttaatctgacttcggagccctcggactacgctctggacctcagcactttcctccagcaacacccggccgccttctaactgtgactccccgcactccccaaaaagaatccgaaaaaccacaaagaaacaccaggcgtacctggtgcgcgagagcgtatccccaactgggacttccgaggcaacttgaactcagaacactacagcggagacgccacccggtgcttgaggcgggaccgaggcgcacagagaccgaggcgcatagagaccgaggcacagcccagctggggctaggcccggtgggaaggagagcgtcgttaatttatttcttattgctcctaattaatatttatatgtatttatgtacgtcctcctaggtgatggagatgtgtacgtaatatttattttaacttatgcaagggtgtgagatgttccccctgctgtaaatgcaggtctcttggtatttattgagctttgtgggactggtggaagcaggacacctggaactgcggcaaagtaggagaagaaatggggaggactcgggtgggggaggacgtcccggctgggatgaagtctggtggtgggtcgtaagtttaggaggtgactgcatcctccagcatctcaactccgtctgtctactgtgtgagacttcggcggaccattaggaatgagatccgtgagatccttccatcttcttgaagtcgcctttagggtggctacgaggtagaggggtgggggttggtgggctgtcacggagcgactgtcgagatcgcctagtatgttctgtgaacacaaataaaattgatttactgtctgctaaaaaaaaaaa

SEQ ID NO: 77 - DNA, 730 bp, Homo sapiens
cctccccacccatttcaccaccaccatgacaccgggcacccagtctcctttcttcctgctgctgctcctcacagtgcttacagttgttacaggttctggtcatgcaagctctaccccaggtggagaaaaggagacttcggctacccagagaagttcagtgcccagctctactgagaagaatgctatcccagcaccgactactaccaagagctgcagagagacatttctgaaatggccaggatctgtggtggtacaattgactctggccttccgagaaggtaccatcaatgtccacgacgtggagacacagttcaatcagtataaaacggaagcagcctctcgatataacctgacgatctcagacgtcagcgtgagtgatgtgccatttcctttctctgcccagtctggggctggggtgccaggctggggcatcgcgctgctggtgctggtctgtgttctggttgcgctggccattgtctatctcattgccttggctgtctgtcagtgccgccgaaagaactacgggcagctggacatctttccagcccgggatacctaccatcctatgagcgagtaccccacctaccacacccatgggcgctatgtgccccctagcagtaccgatcgtagcccctatgagaaggtttctgcaggtaatggtggcagcagcctctcttacacaaacccagcagtggcagccacttctgccaacttgtaggggcacgtcgcc

SEQ ID NO: 78 - DNA, 805 bp, Homo sapiens
cctccccacccatttcaccaccaccatgacaccgggcacccagtctcctttcttcctgctgctgctcctcacagtgcttacagttgttacaggttctggtcatgcaagctctaccccaggtggagaaaaggagacttcggctacccagagaagttcagtgcccagctctactgagaagaatgcttttaattcctctctggaagatcccagcaccgactactaccaagagctgcagagagacatttctgaaatgtttttgcagatttataaacaagggggttttctgggcctctccaatattaagttcaggccaggatctgtggtggtacaattgactctggccttccgagaaggtaccatcaatgtccacgacgtggagacacagttcaatcagtataaaacggaagcagcctctcgatataacctgacgatctcagacgtcagcgtgagtgatgtgccatttcctttctctgcccagtctggggctggggtgccaggctggggcatcgcgctgctggtgctggtctgtgttctggttgcgctggccattgtctatctcattgccttggctgtctgtcagtgccgccgaaagaactacgggcagctggacatctttccagcccgggatacctaccatcctatgagcgagtaccccacctaccacacccatgggcgctatgtgccccctagcagtaccgatcgtagcccctatgagaaggtttctgcaggtaatggtggcagcagcctctcttacacaaacccagcagtggcagccacttctgccaacttgtaggggcacgtcgcc

SEQ ID NO: 79 - DNA, 859 bp, Homo sapiens
cctccccacccatttcaccaccaccatgacaccgggcacccagtctcctttcttcctgctgctgctcctcacagtgcttacagttgttacaggttctggtcatgcaagctctaccccaggtggagaaaaggagacttcggctacccagagaagttcagtgcccagctctactgagaagaatgctttgtctactggggtctctttctttttcctgtcttttcacatttcaaacctccagtttaattcctctctggaagatcccagcaccgactactaccaagagctgcagagagacatttctgaaatgtttttgcagatttataaacaagggggttttctgggcctctccaatattaagttcaggccaggatctgtggtggtacaattgactctggccttccgagaaggtaccatcaatgtccacgacgtggagacgcagttcaatcagtataaaacggaagcagcctctcgatataacctgacgatctcagacgtcagcgtgagtgatgtgccatttcctttctctgcccagtctggggctggggtgccaggctggggcatcgcgctgctggtgctggtctgtgttctggttgcgctggccattgtctatctcattgccttggctgtctgtcagtgccgccgaaagaactacgggcagctggacatctttccagcccgggatacctaccatcctatgagcgagtaccccacctaccacacccatgggcgctatgtgccccctagcagtaccgatcgtagcccctatgagacggtttctgcaggtaatggtggcagcagcctctcttacacaaacccagcagtggcagccacttctgccaacttgtaggggcacgtcgcc

SEQ ID NO: 80 - DNA, 4139 bp, Homo sapiens
ccgctccacctctcaagcagccagcgcctgcctgaatctgttctgccccctccccacccatttcaccaccaccatgacaccgggcacccagtctcctttcttcctgctgctgctcctcacagtgcttacagttgttacaggttctggtcatgcaagctctaccccaggtggagaaaaggagacttcggctacccagagaagttcagtgcccagctctactgagaagaatgctgtgagtatgaccagcagcgtactctccagccacagccccggttcaggctcctccaccactcagggacaggatgtcactctggccccggccacggaaccagcttcaggttcagctgccacctggggacaggatgtcacctcggtcccagtcaccaggccagccctgggctccaccaccccgccagcccacgatgtcacctcagccccggacaacaagccagccccgggctccaccgcccccccagcccacggtgtcacctcggccccggacaccaggccggccccgggctccaccgcccccccagcccacggtgtcacctcggccccggacaccaggccggccccgggctccaccgcccccccagcccacggtgtcacctcggccccggacaccaggccggccccgggctccaccgcccccccagcccacggtgtcacctcggccccggacaccaggccggccccgggctccaccgcccccccagcccacggtgtcacctcggccccggacaccaggccggccccgggctccaccgcccccccagcccacggtgtcacctcggccccggacaccaggccggccccgggctccaccgcccccccagcccacggtgtcacctcggccccggacaccaggccggccccgggctccaccgcccccccagcccacggtgtcacctcggccccggacaccaggccggccccgggctccaccgcccccccagcccacggtgtcacctcggccccggacaccaggccggccccgggctccaccgcccccccagcccacggtgtcacctcggccccggacaccaggccggccccgggctccaccgcccccccagcccacggtgtcacctcggccccggacaccaggccggccccgggctccaccgcccccccagcccacggtgtcacctcggccccggacaccaggccggccccgggctccaccgcccccccagcccacggtgtcacctcggccccggacaccaggccggccccgggctccaccgcccccccagcccacggtgtcacctcggccccggacaccaggccggccccgggctccaccgcccccccagcccacggtgtcacctcggccccggacaccaggccggccccgggctccaccgcccccccagcccacggtgtcacctcggccccggacaccaggccggccccgggctccaccgcccccccagcccacggtgtcacctcggccccggacaccaggccggccccgggctccaccgcccccccagcccacggtgtcacctcggccccggacaccaggccggccccgggctccaccgcccccccagcccacggtgtcacctcggccccggacaccaggccggccccgggctccaccgcccccccagcccacggtgtcacctcggccccggacaccaggccggccccgggctccaccgcccccccagcccacggtgtcacctcggccccggacaccaggccggccccgggctccaccgcccccccagcccacggtgtcacctcggccccggacaccaggccggccccgggctccaccgcccccccagcccacggtgtcacctcggccccggacaccaggccggccccgggctccaccgcccccccagcccacggtgtcacctcggccccggacaccaggccggccccgggctccaccgcccccccagcccacggtgtcacctcggccccggacaccaggccggccccgggctccaccgcccccccagcccacggtgtcacctcggccccggacaccaggccggccccgggctccaccgcccccccagcccacggtgtcacctcggccccggacaccaggccggccccgggctccaccgcccccccagcccacggtgtcacctcggccccggacaccaggccggccccgggctccaccgcccccccagcccacggtgtcacctcggccccggacaccaggccggccccgggctccaccgcccccccagcccacggtgtcacctcggccccggacaccaggccggccccgggctccaccgcccccccagcccacggtgtcacctcggccccggacaccaggccggccccgggctccaccgcccccccagcccacggtgtcacctcggccccggacaccaggccggccccgggctccaccgcccccccagcccacggtgtcacctcggccccggacaccaggccggccccgggctccaccgcccccccagcccacggtgtcacctcggccccggacaccaggccggccccgggctccaccgcccccccagcccacggtgtcacctcggccccggacaccaggccggccccgggctccaccgcccccccagcccacggtgtcacctcggccccggacaccaggccggccccgggctccaccgcccccccagcccacggtgtcacctcggccccggacaccaggccggccccgggctccaccgcccccccagcccacggtgtcacctcggccccggacaccaggccggccccgggctccaccgcccccccagcccacggtgtcacctcggccccggacaccaggccggccccgggctccaccgcccccccagcccacggtgtcacctcggccccggacaccaggccggccccgggctccaccgcccccccagcccatggtgtcacctcggccccggacaacaggcccgccttgggctccaccgcccctccagtccacaatgtcacctcggcctcaggctctgcatcaggctcagcttctactctggtgcacaacggcacctctgccagggctaccacaaccccagccagcaagagcactccattctcaattcccagccaccactctgatactcctaccacccttgccagccatagcaccaagactgatgccagtagcactcaccatagctcggtacctcctctcacctcctccaatcacagcacttctccccagttgtctactggggtctctttctttttcctgtcttttcacatttcaaacctccagtttaattcctctctggaagatcccagcaccgactactaccaagagctgcagagagacatttctgaaatgtttttgcagatttataaacaagggggttttctgggcctctccaatattaagttcaggccaggatctgtggtggtacaattgactctggccttccgagaaggtaccatcaatgtccacgacgtggagacacagttcaatcagtataaaacggaagcagcctctcgatataacctgacgatctcagacgtcagcgtgagtgatgtgccatttcctttctctgcccagtctggggctggggtgccaggctggggcatcgcgctgctggtgctggtctgtgttctggttgcgctggccattgtctatctcattgccttggctgtctgtcagtgccgccgaaagaactacgggcagctggacatctttccagcccgggatacctaccatcctatgagcgagtaccccacctaccacacccatgggcgctatgtgccccctagcagtaccgatcgtagcccctatgagaaggtttctgcaggtaacggtggcagcagcctctcttacacaaacccagcagtggcagccgcttctgccaacttgtagggcacgtcgccgctgagctgagtggccagccagtgccattccactccactcaggttcttcaggccagagcccctgcaccctgtttgggctggtgagctgggagttcaggtgggctgctcacagcctccttcagaggccccaccaatttctcggacacttctcagtgtgtggaagctcatgtgggcccctgaggctcatgcctgggaagtgttgtgggggctcccaggaggactggcccagagagccctgagatagcggggatcctgaactggactgaataaaacgtggtctcccactg

SEQ ID NO: 81 - DNA, 759 bp, Homo sapiens
atgacaccgggcacccagtctcctttcttcctgctgctgctcctcacagtgcttacaggttctggtcatgcaagctctaccccaggtggagaaaaggagacttcggctacccagagaagttcagtgcccagctctactgagaagaatgcttttaattcctctctggaagatcccagcaccgactactaccaagagctgcagagagacatttctgaaatgtttttgcagatttataaacaagggggttttctgggcctctccaatattaagttcaggccaggatctgtggtggtacaattgactctggccttccgagaaggtaccatcaatgtccacgacatggagacacagttcaatcagtataaaacggaagcagcctctcgatataacctgacgatctcagacgtcagcgtgagtgatgtgccatttcctttctctgcccagtctggggctggggtgccaggctggggcatcgcgctgctggtgctggtctgtgttctggttgcgctggccattgtctatctcattgccttggctgtctgtcagtgccgccgaaagaactacgggcagctggacatctttccagcccgggatacctaccatcctatgagcgagtaccccacctaccacacccatgggcgctatgtgccccctagcagtaccgatcgtagcccctatgagaaggtttctgcaggtaatggtggcagcagcctctcttacacaaacccagcagtggcagccacttctgccaacttgtag

SEQ ID NO: 82 - DNA, 1296 bp, Homo sapiens
ccgggctccaccgcccccccagcccatggtgtcacctcggccccggacaacaggcccgccttgggctccaccgcccctccagtccacaatgtcacctcggcctcaggctctgcatcaggctcagcttctactctggtgcacaacggcacctctgccagggctaccacaaccccagccagcaagagcactccattctcaattcccagccaccactctgatactcctaccacccttgccagccatagcaccaagactgatgccagtagcactcaccatagcacggtacctcctctcacctcctccaatcacagcacttctccccagttgtctactggggtctctttctttttcctgtcttttcacatttcaaacctccagtttaattcctctctggaagatcccagcaccgactactaccaagagctgcagagagacatttctgaaatgtttttgcagatttataaacaagggggttttctgggcctctccaatattaagttcaggccaggatctgtggtggtacaattgactctggccttccgagaaggtaccatcaatgtccacgacgtggagacacagttcaatcagtataaaacggaagcagcctctcgatataacctgacgatctcagacgtcagcgtgagtgatgtgccatttcctttctctgcccagtctggggctggggtgccaggctggggcatcgcgctgctggtgctggtctgtgttctggttgcgctggccattgtctatctcattgccttggctgtctgtcagtgccgccgaaagaactacgggcagctggacatctttccagcccgggatacctaccatcctatgagcgagtaccccacctaccacacccatgggcgctatgtgccccctagcagtaccgatcgtagcccctatgagaaggtttctgcaggtaatggtggcagcagcctctcttacacaaacccagcagtggcagccacttctgccaacttgtaggggcacgtcgcccgctgagctgagtggccagccagtgccattccactccactcaggttcttcagggccagagcccctgcaccctgtttgggctggtgagctgggagttcaggtgggctgctcacagcctccttcagaggccccaccaatttctcggacacttctcagtgtgtggaagctcatgtgggcccctgagggctcatgcctgggaagtgttgtggtgggggctcccaggaggactggcccagagagccctgagatagcggggatcctgaactggactgaataaaacgtggtctcccactgcgcc

SEQ ID NO: 83 - DNA, 1296 bp, Homo sapiens; identical to SEQ ID NO: 82

SEQ ID NO: 84 - DNA, 1804 bp, Homo sapiens
cgctccacctctcaagcagccagcgcctgcctgaatctgttctgccccctccccacccatttcaccaccaccatgacaccgggcacccagtctcctttcttcctgctgctgctcctcacagtgcttacagttgttacaggttctggtcatgcaagctctaccccaggtggagaaaaggagacttcggctacccagagaagttcagtgcccagctctactgagaagaatgctgtgagtatgaccagcagcgtactctccagccacagccccggttcaggctcctccaccactcagggacaggatgtcactctggccccggccacggaaccagcttcaggttcagctgccacctggggacaggatgtcacctcggtcccagtcaccaggccagccctgggctccaccaccccgccagcccacgatgtcacctcagccccggacaacaagccagccccgggctccaccgcccccccagcccacggtgtcacctcggccccggacaccaggccggccccgggctccaccgcccccccagcccatggtgtcacctcggccccggacaacaggcccgccttgggctccaccgcccctccagtccacaatgtcacctcggcctcaggctctgcatcaggctcagcttctactctggtgcacaacggcacctctgccagggctaccacaaccccagccagcaagagcactccattctcaattcccagccaccactctgatactcctaccacccttgccagccatagcaccaagactgatgccagtagcactcaccatagcacggtacctcctctcacctcctccaatcacagcacttctccccagttgtctactggggtctctttctttttcctgtcttttcacatttcaaacctccagtttaattcctctctggaagatcccagcaccgactactaccaagagctgcagagagacatttctgaaatgtttttgcagatttataaacaagggggttttctgggcctctccaatattaagttcaggccaggatctgtggtggtacaattgactctggccttccgagaaggtaccatcaatgtccacgacgtggagacacagttcaatcagtataaaacggaagcagcctctcgatataacctgacgatctcagacgtcagcgtgagtgatgtgccatttcctttctctgcccagtctggggctggggtgccaggctggggcatcgcgctgctggtgctggtctgtgttctggttgcgctggccattgtctatctcattgccttggctgtctgtcagtgccgccgaaagaactacgggcagctggacatctttccagcccgggatacctaccatcctatgagcgagtaccccacctaccacacccatgggcgctatgtgccccctagcagtaccgatcgtagcccctatgagaaggtttctgcaggtaatggtggcagcagcctctcttacacaaacccagcagtggcagccacttctgccaacttgtaggggcacgtcgcccgctgagctgagtggccagccagtgccattccactccactcaggttcttcagggccagagcccctgcaccctgtttgggctggtgagctgggagttcaggtgggctgctcacaccgtccttcagaggccccaccaatttctcggacacttctcagtgtgtggaagctcatgtgggcccctgaggctcatgcctgggaagtgttgtggtgggggctcccaggaggactggcccagagagccctgagatagcggggatcctgaactggactgaataaaacgtggtctcccactg

SEQ ID NO: 85 - DNA, 4139 bp, Homo sapiens; identical to SEQ ID NO: 80

SEQ ID NO: 86 - DNA, 543 bp, Homo sapiens
ctccccacccatttcaccaccaccatgacaccgggcacccagtctcctttcttcctgctgctgctcctcacagtgcttacagttgttacaggttctggtcatgcaagctctaccccaggtggagaaaaggagacttcggctacccagagaagttcagtgcccagctctactgagaagaatgctttgtctactggggtctctttctttttcctgtcttttcacatttcaaacctccagtttaattcctctctggaagatcccagcaccgactactaccaagagctgcagagagacatttctgaaatggctgtctgtcagtgccgccgaaagaactacgggctgctggacatctttccagcccgggatacctaccatcctatgagcgagtaccccacctaccacacccatgggcgctatgtgccccctagcagtaccgatcgtagcccctatgagaaggtttctgcaggtaatggtggcagcagcctctcttacacaaacccagcagtggcagccacttctgccaacttgtaggggcacgtcgcc

SEQ ID NO: 87 - DNA, 2238 bp, Homo sapiens
gaattccctggctgcttgaatctgttctgccccctccccacccatttcaccaccaccatgacaccgggcacccagtctcctttcttcctgctgctgctcctcacagtgcttacagttgttacaggttctggtcatgcaagctctaccccaggtggagaaaaggagacttcggctacccagagaagttcagtgcccagctctactgagaagaatgctgtgagtatgaccagcagcgtactctccagccacagccccggttcaggctcctccaccactcagggacaggatgtcactctggccccggccacggaaccagcttcaggttcagctgccacctggggacaggatgtcacctcggtcccagtcaccaggccagccctgggctccaccaccccgccagcccacgatgtcacctcagccccggacaacaagccagccccgggctccaccgcccccccagcccacggtgtcacctcggccccggacaccaggccgcccccgggctccaccgcccccccagcccacggtgtcacctcggccccggacaccaggccgcccccgggctccaccgcgcccgcagcccacggtgtcacctcggccccggacaccaggccggccccgggctccaccgcccccccagcccatggtgtcacctcggccccggacaacaggcccgccttgggctccaccgcccctccagtccacaatgtcacctcggcctcaggctctgcatcaggctcagcttctactctggtgcacaacggcacctctgccagggctaccacaaccccagccagcaagagcactccattctcaattcccagccaccactctgatactcctaccacccttgccagccatagcaccaagactgatgccagtagcactcaccatagcacggtacctcctctcacctcctccaatcacagcacttctccccagttgtctactggggtctctttctttttcctgtcttttcacatttcaaacctccagtttaattcctctctggaagatcccagcaccgactactaccaagagctgcagagagacatttctgaaatggtgagtatcggcctttccttccccatgctcccctgaagcagccatcagaactgtccacaccctttgcatcaagcctgagtcctttccctctcaccccagtttttgcagatttataaacaagggggttttctgggcctctccaatattaagttcaggtacagttctgggtgtggacccagtgtggtggttggagggttgggtggtggtcatgaccgtaggagggactggtcgcacttaaggttgggggaagagtcgtgagccagagctgggacccgtggctgaagtgcccatttccctgtgaccaggccaggatctgtggtggtacaattgactctggccttccgagaaggtaccatcaatgtccacgacgtggagacacagttcaatcagtataaaacggaagcagcctctcgatataacctgacgatctcagacgtcagcggtgaggctacttccctggctgcagcccagcaccatgccggggccctctccttccagtgcctgggtccccgctctttccttagtgctggcagcgggaggggcgcctcctctgggagactgccctgaccactgcttttccttttagtgagtgatgtgccatttcctttctctgcccagtctggggctggggtgccaggctggggcatcgcgctgctggtgctggtctgtgttctggttgcgctggccattgtctatctcattgccttggtgagtgcagtccctggccctgatcagagccccccggtagaaggcactccatggcctgccataacctcctatctccccaggctgtctgtcagtgccgccgaaagaactacgggcagctggacatctttccagcccgggatacctaccatcctatgagcgagtaccccacctaccacacccatgggcgctatgtgccccctagcagtaccgatcgtagcccctatgagaaggtgagattggccccacaggccaggggaagcagagggtttggctgggcaaggattctgaagggggtacttggaaaacccaaagagcttggaagaggtgagaagtggcgtgaagtgagcaggggagggcctggaaaggatgaggggcagaggtcagaggagttttgggggacaggcctgggaggagactatggaagaaaggggccctcaaaagggagtggccccactgccagaattc

SEQ ID NO: 88 - DNA, 1721 bp, Homo sapiens
gaattccctggctgcttgaatctgttctgccccctccccacccatttcaccaccaccatgacaccgggcacccagtctcctttcttcctgctgctgctcctcacagtgcttacagttgttacaggttctggtcatgcaagctctaccccaggtggagaaaaggagacttcggctacccagagaagttcagtgcccagctctactgagaagaatgctgtgagtatgaccagcagcgtactctccagccacagccccggttcaggctcctccaccactcagggacaggatgtcactctggccccggccacggaaccagcttcaggttcagctgccacctggggacaggatgtcacctcggtcccagtcaccaggccagccctgggctccaccaccccgccagcccacgatgtcacctcagccccggacaacaagccagccccgggctccaccgcccccccagcccacggtgtcacctcggccccggacaccaggccgcccccgggctccaccgcccccccagcccacggtgtcacctcggccccggacaccaggccgcccccgggctccaccgcgcccgcagcccacggtgtcacctcggccccggacaccaggccggccccgggctccaccgcccccccagcccatggtgtcacctcggccccggacaacaggcccgccttggcgtccaccgcccctccagtccacaatgtcacctcggcctcaggctctgcatcaggctcagcttctactctggtgcacaacggcacctctgccagggctaccacaaccccagccagcaagagcactccattctcaattcccagccaccactctgatactcctaccacccttgccagccatagcaccaagactgatgccagtagcactcaccatagcacggtacctcctctcacctcctccaatcacagcacttctccccagttgtctactggggtctctttctttttcctgtcttttcacatttcaaacctccagtttaattcctctctggaagatcccagcaccgactactaccaagagctgcagagagacatttctgaaatgtttttgcagatttataaacaagggggttttctgggcctctccaatattaagttcaggccaggatctgtggtggtacaattgactctggccttccgagaaggtaccatcaatgtccacgacgtggagacacagttcaatcagtataaaacggaagcagcctctcgatataacctgacgatctcagacgtcagcgtgagtgatgtgccatttcctttctctgcccagtctggggctggggtgccaggctggggcatcgcgctgctggtgctggtctgtgttctggttgcgctggccattgtctatctcattgccttggctgtctgtcagtgccgccgaaagaactacgggcagctggacatctttccagcccgggatacctaccatcctatgagcgagtaccccacctaccacacccatgggcgctatgtgccccctagcagtaccgatcgtagcccctatgagaaggtttctgcaggtaatggtggcagcagcctctcttacacaaacccagcagtggcagccacttctgccaacttgtaggggcacgtcgccctctgagctgagtggccagccagtgccattccactccactcagggctctctgggccagtcctcctgggagcccccaccacaacacttcccaggcatggaattcc

SEQ ID NO: 89 - DNA, 293 bp, Homo sapiens
cctccccacccatttcaccaccaccatggcaccgggcacccagtctcctttcttcctgctgctgctcctcacagtgcttacagttgttacaggttctggtcatgcaagctctaccccaggtggagaaaaggagacttcggctacccagcgaagttcagtgcccagctctactgagaagaatgctgtgagtatgaccagcagcgtactctccagccacagccccggttcaggctcctccaccactcagggacaggatgtcactctggccccggccacggaaccagcttcaggtt

SEQ ID NO: 90 - DNA, 336 bp, Homo sapiens
accaccaccatgacaccgggcacccagtctcctttcttcctgctgctgctcctcacagtgcttacagctaccacagcccctaaacccgcaacagttgttacaggttctggtcatgcaagctctaccccaggtggagaaaaggagacttcggctacccagagaagttcagtgcccagctctactgagaagaatgctgtgagtatgaccagcagcgtactctccagccacagccccggttcaggctcctccaccactcagggacaggatgtcactctggccccggccacggaaccagcttcaggttcagctgccacctggggacaggatgtcacctcg

SEQ ID NO: 91 - DNA, 177 bp, Homo sapiens
ccgctccacctctcaagcagccagcgcctgcctgaatctgttctgccccctccccacccatttcaccaccaccatgacaccgggcacccagtctcctttcttcctgctgctgctcctcacagtgcttacaggtggagaaaaggagacttcggctacccagagaagttcagtgcccag

SEQ ID NO: 92 - DNA, 204 bp, Homo sapiens
ccgctccacctctcaagcagccagcgcctgcctgaatctgttctgccccctccccacccatttcaccaccaccatgacaccgggcacccagtctcctttcttcctgctgctgctcctcacagtgcttacaggttctggtcatgcaagctctaccccaggtggagaaaaggagacttcggctacccagagaagttcagtgcccag

SEQ ID NO: 93 - DNA, 572 bp, Homo sapiens
acctctcaagcagccagcgcctgcctgaatctgttctgccccctccccacccatttcaccaccaccatgacaccgggcacccagtctcctttcttcctgctgctgctcctcacagtgcttacagctaccacagcccctaaacccgcaacagttgttacgggttctggtcatgcaagctctaccccaggtggagaaaaggagacttcggctacccagagaagttcagtgcccagctctactgagaagaatgctgtgagtatgaccagcagcgtactctccagccacagccccggttcaggctcctccaccactcagggacaggatgtcactctggccccggccacggaaccagcttcaggttcagctgccacctggggacaggatgtcacctcggtcccagtcaccaggccagccctgggctccaccaccccgccagcccacgatgtcacctcagccccggacaacaagccagccccgggctccaccgccccccaagcccacggtgtcacctcggccccggacaccaggccggccccgggctccaccgccccccaagcccacggtgtcacctc

SEQ ID NO: 94 - DNA, 768 bp, Homo sapiens
atgacaccgggcacccagtctcctttcttcctgctgctgctcctcacagtgcttacagttgttacaggttctggtcatgcaagctctaccccaggtggagaaaaggagacttcggctacccagagaagttcagtgcccagctctactgagaagaatgcttttaattcctctctggaagatcccagcaccgactactaccaagagctgcagagagacatttctgaaatgtttttgcagatttataaacaagggggttttctgggcctctccaatattaagttcaggccaggatctgtggtggtacaattgactctggccttccgagaaggtaccatcaatgtccacgacgtggagacacagttcaatcagtataaaacggaagcagcctctcgatataacctgacgatctcagacgtcagcgtgagtgatgtgccatttcctttctctgcccagtctggggctggggtgccaggctggggcatcgcgctgctggtgctggtctgtgttctggttgcgctggccattgtctatctcattgccttggctgtctgtcagtgccgccgaaagaactacgggcagctggacatctttccagcccgggatacctaccatcctatgagcgagtaccccacctaccacacccatgggcgctatgtgccccctagcagtaccgatcgtagcccctatgagaaggtttctgcaggtaatggtggcagcagcctctcttacacaaacccagcagtggcagccacttctgccaacttgtag

SEQ ID NO: 95 - DNA, 2583 bp, Homo sapiens
gagccatggggggaaagcagcgggacgaggatgacgaggcctacgggaagccagtcaaatacgacccctcctttcgaggccccatcaagaacagaagctgcacagatgtcatctgctgcgtcctcttcctgctcttcattctaggttacatcgtggtggggattgtggcctggttgtatggagacccccggcaagtcctctaccccaggaactctactggggcctactgtggcatgggggagaacaaagataagccgtatctcctgtacttcaacatcttcagctgcatcctgtccagcaacatcatctcagttgctgagaacggcctacagtgccccacaccccaggtgtgtgtgtcctcctgcccggaggacccatggactgtggaaaaaaacgagttctcacagactgttggggaagtcttctatacaaaaaacaggaacttttgtctgccaggggtaccctggaatatgacggtgatcacaagcctgcaacaggaactctgccccagtttcctcctcccctctgctccagctctgggacgctgctttccatggaccaacattactccaccggcgctcccagggatcaccaatgacaccaccatacagcaggggatcagcggtcttattgacagcctcaatgcccgagacatcagtgttaagatctttgaagattttgcccagtcctggtattggattcttgttgccctgggggtggctctggtcttgagcctactgtttatcttgcttctgcgcctggtggctgggcccctggtgctggtgctgatcctgggagtgctgggcgtgctggcatatggcatctactactgctgggaggagtaccgagtgctgcgggacaagggcgcctccatctcccagctgggtttcaccaccaacctcagtgcctaccagagcgtgcaggagacctggctggccgccctgatcgtgttggcggtgcttgaagccatcctgctgctggtgctcatcttcctgcggcagcggattcgtattgccatcgccctcctgaaggaggccagcaaggctgtgggacagatgatgtctaccatgttctacccactggtcacctttgtcctcctcctcatctgcattgcctactgggccatgactgctctgtacctggctacatcggggcaaccccagtatgtgctctgggcatccaacatcagctcccccggctgtgagaaagtgccaataaatacatcatgcaaccccacggcccaccttgtgaactcctcgtgcccagggctgatgtgcgtcttccagggctactcatccaaaggcctaatccaacgttctgtcttcaatctgcaaatctatggggtcctggggctcttctggacccttaactgggtactggccctgggccaatgcgtcctcgctggagcctttgcctccttctactgggccttccacaagccccaggacatccctaccttccccttaatctctgccttcatccgcacactccgttaccacactgggtcattggcatttggagccctcatcctgacccttgtgcagatagcccgggtcatcttggagtatattgaccacaagctcagaggagtgcagaaccctgtagcccgctgcatcatgtgctgtttcaagtgctgcctctggtgtctggaaaaatttatcaagttcctaaaccgcaatgcatacatcatgatcgccatctacgggaagaatttctgtgtctcagccaaaaatgcgttcatgctactcatgcgaaacattgtcagggtggtcgtcctggacaaagtcacagacctgctgctgttctttgggaagctgctggtggtcggaggcgtgggggtcctgtccttcttttttttctccggtcgcatcccggggctgggtaaagactttaagagcccccacctcaactattggctgcccatcatgacctccatcctgggggcctatgtcatcgccagcggcttcttcagcgttttcggcatgtgtgtggacacgctcttcctctgcttcctggaagacctggagcggaacaacggctccctggaccggccctactacatgtccaagagccttctaaagattctgggcaagaagaacgaggcgcccccggacaacaagaagaggaagaagtgacagctccggccctgatccaggactgcaccccacccccaccgtccagccatccaacctcacttcgccttacaggtctccattttgtggtaaaaaaaggttttaggccaggcgccgtggctcacgcctgtaatccaacactttgagaggctgaggcgggcggatcacctgagtcaggagttcgagaccagcctggccaacatggtgaaacctccgtctctattaaaaatacaaaaattagccgagagtggtggcatgcacctgtcatcccagctactcgggaggctgaggcaggagaatcgcttgaacccgggaggcagaggttgcagtgagccgagatcgcgccactgcactccaacctgggtgacagactctgtctccaaaacaaaacaaacaaacaaaaagattttattaaagatattttgttaactcaaaaaaaaaaaaaaaaaaa

SEQ ID NO: 96 - DNA, 2347 bp, Homo sapiens
atggggggaaagcagcgggacgaggatgacgaggcctacgggaagccagtcaaatacgacccctcctttcgaggccccatcaagaacagaagctgcacagatgtcatctgctgcgtcctcttcctgctcttcattctaggttacatcgtggtggggattgtggcctggttgtatggagacccccggcaagtcctctaccccaggaactctactggggcctactgtggcatgggggagaacaaagataagccgtatctcctgtacttcaacatcttcagctgcatcctgtccagcaacatcatctcagttgctgagaacggcctacagtgccccacaccccaggtgtgtgtgtcctcctgcccggaggacccatggactgtgggaaaaaacgagttctcacagactgttggggaagtcttctatacaaaaaacaggaacttttgtctgccaggggtaccctggaatatgacggtgatcacaagcctgcaacaggaactctgccccagtttcctcctcccctctgctccagctctgggacgctgctttccatggaccaacattactccaccggcgctcccagggatcaccaatgacaccaccatacagcaggggatcagcggtcttattgacagcctcaatgcccgagacatcagtgttaagatctttgaagattttgcccagtcctggtattggattcttgttgccctgggggtggctctggtcttgagcctactgtttatcttgcttctgcgcctggtggctgggcccctggtgctggtgctgatcctgggagtgctgggcgtgctggcatatggcatctactactgctgggaggagtaccgagtgctgcgggacaagggcgcctccatctcccagctgggtttcaccaccaacctcagtgcctaccagagcgtgcaggagacctggctggccgccctgatcgtgttggcggtgcttgaagccatcctgctgctggtgctcatcttcctgcggcagcggattcgtattgccatcgccctcctgaaggaggccagcaaggctgtgggacagatgatgtctaccatgttctacccactggtcacctttgtcctcctcctcatctgcattgcctactgggccatgactgctctgtatcctctgcccacgcagccagccactcttggatatgtgctctgggcatccaacatcagctcccccggctgtgagaaagtgccaataaatacatcatgcaaccccacggcccaccttgtgaactcctcgtgcccagggctgatgtgcgtcttccagggctactcatccaaaggcctaatccaacgttctgtcttcaatctgcaaatctatggggtcctggggctcttctggacccttaactgggtactggccctgggccaatgcgtcctcgctggagcctttgcctccttctactgggccttccacaagccccaggacatccctaccttccccttaatctctgccttcatccgcacactccgttaccacactgggtcattggcatttggagccctcatcctgacccttgtgcagatagcccgggtcatcttggagtatattgaccacaagctcagaggagtgcagaaccctgtagcccgctgcatcatgtgctgtttcaagtgctgcctctggtgtctggaaaaatttatcaagttcctaaaccgcaatgcatacatcatgatcgccatctacgggaagaatttctgtgtctcagccaaaaatgcgttcatgctactcatgcgaaacattgtcagggtggtcgtcctggacaaagtcacagacctgctgctgttctttgggaagctgctggtggtcggaggcgtgggggtcctgtccttcttttttttctccggtcgcatcccggggctgggtaaagactttaagagcccccacctcaactattactggctgcccatcatgacctccatcctgggggcctatgtcatcgccagcggcttcttcagcgttttcggcatgtgtgtggacacgctcttcctctgcttcctggaagacctggagcggaacaacggctccctggaccggccctactacatgtccaagagccttctaaagattctgggcaagaagaacgaggcgcccccggacaacaagaagaggaagaagtgacagctccggccctgatccaggactgcaccccacccccaccgtccagccatccaacctcacttcgccttacaggtctccattttgtggtaaaaaaaggttttaggccaggcgccgtggctcacgcctgtaatccaacactttgagaggctgaggcgggcggatcacctgagtcaggagttcgagaccagcctggccaacatggtgaaac

SEQ ID NO: 97 - DNA, 2579 bp, Homo sapiens
actccggagactgagccatggggggaaagcagcgggacgaggatgacgaggcctacgggaagccagtcaaatacgacccctcctttcgaggccccatcaagaacagaagctgcacagatgtcatctgctgcgtcctcttcctgctcttcattctaggttacatcgtggtggggattgtggcctggttgtatggagacccccggcaagtcctctaccccaggaactctactggggcctactgtggcatgggggagaacaaagataagccgtatctcctgtacttcaacatcttcagctgcatcctgtccagcaacatcatctcagttgctgagaacggcctacagtgccccacaccccaggtgtgtgtgtcctcctgcccggaggacccatggactgtgggaaaaaacgagttctcacagactgttggggaagtcttctatacaaaaagcagcaacttttgtctgccaggggtaccctggaatatgacggtgatcacaagcctgcaacaggaactctgccccagtttcctcctcccctctgctccagctctgggacgctgctttccatggaccaacattactccaccggcgctcccagggatcaccaatgacaccaccatacagcaggggatcagcggtcttattgacagcctcaatgcccgagacatcagtgttaagatctttgaagattttgcccagtcctggtattggattcttgttgccctgggggtggctctggtcttgagcctactgtttatcttgcttctgcgcctggtggctgggcccctggtgctggtgctgatcctgggagtgctgggcgtgctggcatacggcatctactactgctgggaggagtaccgagtgctgcgggacaagggcgcctccatctcccagctgggtttcaccaccaacctcagtgcctaccagagcgtgcaggagacctggctggccgccctgatcgtgttggcggtgcttgaagccatcctgctgctggtgctcatcttcctgcggcagcggattcgtattgccatcgccctcctgaaggaggccagcaaggctgtgggacagatgatgtctaccatgttctacccactggtcacctttgtcctcctcctcatctgcattgcctactgggccatgactgctctgtacctggctacatcggggcaaccccagtatgtgctctgggcatccaacatcagctcccccggctgtgagaaagtgccaataaatacatcatgcaaccccacggcccaccttgtgaactcctcgtgcccagggctgatgtgcgtcttccagggctactcatccaaaggcctaatccaacgttctgtcttcaatctgcaaatctatggggtcctggggctcttctggacccttaactgggtactggccctgggccaatgcgtcctcgctggagcctttgcctccttctactgggccttccacaagccccaggacatccctaccttccccttaatctctgccttcatccgcacactccgttaccacactgggtcattggcatttggagccctcatcctgacccttgtgcagatagcccgggtcatcttggagtatattgaccacaagctcagaggagtgcagaaccctgtagcccgctgcatcatgtgctgtttcaagtgctgcctctggtgtctggaaaaatttatcaagttcctaaaccgcaatgcatacatcatgatcgccatctacgggaagaatttctgtgtctcagccaaaaatgcgttcatgctactcatgcgaaacattgtcagggtggtcgtcctggacaaagtcacagacctgctgctgttctttgggaagctgctggtggtcggaggcgtgggggtcctgtccttcttttttttctccggtcgcatcccggggctgggtaaagactttaagagcccccacctcaactattactggctgcccatcatgacctccatcctgggggcctatgtcatcgccagcggcttcttcagcgttttcggcatgtgtgtggacacgctcttcctctgcttcctggaagacctggagcggaacaacggctccctggaccggccctactacatgtccaagagccttctaaagattctgggcaagaagaacgaggcgcccccggacaacaagaagaggaagaagtgacagctccggccctgatccaggactgcaccccacccccaccgtccagccatccaacctcacttcgccttacaggtctccattttgtggtaaaaaagggttttaggccaggcgccgtggctcacgcctgtaatccaacactttgagaggctgaggcgggcggatcacctgagtcaggagttcgagaccagcctggccaacatggtgaaacctccgtctctattaaaaatacaaaaattagccgagagtggtggcatgcacctgtcatcccagctactcgggaggctgaggcaggagaatcgcttgaacccgggaggcagaggttgcagtgagccgagatcgcgccactgcactccaacctgggtgacagactctgtctccaaaacaaaacaaacaaacaaaaagattttattaaagatattttgttaactc

SEQ ID NO: 98 - DNA, 2579 bp, Homo sapiens; identical to SEQ ID NO: 97

SEQ ID NO: 99 - DNA, 1002 bp, Homo sapiens
atggggggaaagcagcgggacgaggatgacgaggcctacgggaagccagtcaaatacgacccctcctttcgaggccccatcaagaacagaagctgcacagatgtcatctgctgcgtcctcttcctgctcttcattctaggttacatcgtggtggggattgtggcctggttgtatggagacccccggcaagtcctctaccccaggaactctactggggcctactgtggcatgggggagaacaaagataagccgtatctcctgtacttcaacatcttcagctgcatcctgtccagcaacatcatctcagttgctgagaacggcctacagtgccccacaccccaggtgtgtgtgtcctcctgcccggaggacccatggactgtgggaaaaaacgagttctcacagactgttggggaagtcttctatacaaaaaacaggaacttttgtctgccaggggtaccctggaatatgacggtgatcacaagcctgcaacaggaactctgccccagtttcctcctcccctctgctccagctctgggacgctgctttccatggaccaacattactccaccggcgctcccagggatcaccaatgacaccaccatacagcaggggatcagcggtcttattgacagcctcaatgcccgagacatcagtgttaagatctttgaagattttgcccagtcctggtattggattcttgttgccctgggggtggctctggtcttgagcctactgtttatcttgcttctgcgcctggtggctgggcccctggtgctggtgctgatcctgggagtgctgggcgtgctggcatatggcatctactactgctgggaggagtaccgagtgctgcgggacaagggcgcctccatctcccagctgggtttcaccaccaacctcagtgcctaccagagcgtgcaggagacctgccctcatctgagaatactgtctttccatatggctaagtgtggccccaccaccctctctgccctcccgggacattga

SEQ ID NO: 100 - DNA, 2333 bp, Homo sapiens
caaagataagccgtatctcctgtacttcaacatcttcagctgcatcctgtccagcaacatcatctcagttgctgagaacggcctacagtgccccacaccccaggtgtgtgtcctcctgcccggaggacccatggactgtgggaaaaaacgagttctcacagactgttggggaagtcttctatacaaaaaacaggaacttttgtctgccaggggtaccctggaatatgacggtgatcacaagcctgcaacaggaactctgccccagtttcctcctcccctctgctccagctctggggcgctgctttccatggaccaacgttactccaccggcgctcccagggatcaccaatgacaccaccatacagcaggggatcagcggtcttattgacagcctcaatgcccgagacatcagtgttaagatctttgaagattttgcccagtcctggtattggattcttgttgccctgggggtggctctggtcttgagcctactgtttatcttgcttctgcgcctggtggctgggcccctggtgctggtgctgatcctgggagtgctgggcgtgctggcatacggcatctactactgctgggaggagtaccgagtgctgcgggacaagggcgcctccatctcccagctgggtttcaccaccaacctcagtgcctaccagagcgtgcaggagacctggctggccgccctgatcgtgttggcggtgcttgaagccatcctgctgctgatgctcatcttcctgcggcagcggattcgtattgccatcgccctcctgaaggaggccagcaaggctgtgggacagatgatgtctaccatgttctacccactggtcacctttgtcctcctcctcatctgcattgcctactgggccatgactgctctgtacctggctacatcggggcaaccccagtatgtgctctgggcatccaacatcagctcccccggctgtgagaaagtgccaataaatacatcatgcaaccccacggcccaccttgtgaactcctcgtgcccagggctgatgtgcgtcttccagggctactcatccaaaggcctaatccaacgttctgtcttcaatctgcaaatctatggggtcctggggctcttctggacccttaactgggtactggccctgggccaatgcgtcctcgctggagcctttgcctccttctactgggccttccacaagccccaggacatccctaccttccccttaatctctgccttcatccgcacactccgttaccacactgggtcattggcatttggagccctcatcctgacccttgtgcagatagcccgggtcatcttggagtatattgaccacaagctcagaggagtgcagaaccctgtagcccgctgcatcatgtgctgtttcaagtgctgcctctggtgtctggaaaaatttatcaagttcctaaaccgcaatgcatacatcatgatcgccatctacgggaagaatttctgtgtctcagccaaaaatgcgttcatgctactcatgcgaaacattgtcagggtggtcgtcctggacaaagtcacagacctgctgctgttctttgggaagctgctggtggtcggaggcgtgggggtcctgtccttcttttttttctccggtcgcatcccggggctgggtaaagactttaagagcccccacctcaactattactggctgcccatcatgacctccatcctgggggcctatgtcatcgccagcggcttcttcagcgttttcggcatgtgtgtggacacgctcttcctctgcttcctggaagacctggagcggaacaacggctccctggaccggccctactacatgtccaagagccttctaaagattctgggcaagaagaacgaggcgcccccggacaacaagaagaggaagaagtgacagctccggccctgatccaggactgcaccccacccccaccgtccagccatccaacctcacttcgccttacaggtctccattttgtggtaaaaaaaggttttaggccaggcgccgtggctcacgcctgtaatccaacactttgagaggctgaggcgggcggatcacctgagtcaggagttcgagaccagcctggccaacatggtgaaacctccgtctctattaaaaatacaaaaattagccgagagtggtggcatgcacctgtcatcccagctactcgggaggctgaggcaggagaatcgcttgaacccgggaggcagaggttgcagtgagccgagatcgcgccactgcactccaacctgggtgacagactctgtctccaaaacaaaacaaacaaacaaaaagattttattaaagatattttgttaactcaaaaaaaaaaaa

SEQ ID NO: 101 - DNA, 2921 bp, Homo sapiens
cagcgagcgccgtcgtctgcccgggcccgcccatcggggtccccaaccccatccggaccccgccgcccgagcgcgcggccccggaagcacccgcctcccggcatggtgctcaaggccttcttccccacgtgctgcgtctcggcggacagcgggctgctggtgggacggtgggtgccggagcagagcagcgccgtggtcctggcggtcctgcactttcccttcatccccatccaggtcaagcagctcctggcccaggtgcggcaggccagccaggtgggcgtggccgtgctgggcacctggtgccactgccggcaggagcccgaggagagcctgggccgcttcctggagagcctgggtgctgtcttcccccatgagccctggctgcggctgtgccgggagagaggcggcacgttctggagctgcgaggccacccaccggcaagcgcccactgcccccggtgcccctggtgaggaccaggtcatgctcatcttctatgaccagcgccaggtgttgctgtcacagctacacctgcccaccgtcctgcccgaccgccaggctggagccaccactgccagcacggggggcctggctgccgtcttcgacacggtagcacgcagtgaggtgctcttccgcagtgaccgctttgatgagggccccgtgcggctgagccactggcagtcggagggcgtggaggccagcatcctcgcggagctggccaggcgagcctcgggacccatttgtctgctgttggccagcctgctgtcgctggtctcagctgtcagtgcctgccgagtgttcaagctctggcccctgtccttcctcgggagcaaactctccacgtgcgaacagctccggcaccggctggagcacctcacgctaatcttcagtacacggaaggcggagaaccctgcccagctgatgaggaaggccaacacggtggcctctgtgctgctggacgtggccctgggcctcatgctgctgtcctggctccacgggagaagccgcatcgggcatctggccgacgccctcgttcctgtggctgaccacgtggccgaggagctccagcatctgctgcagtggctgatgggtgctcccgccgggctcaagatgaaccgtgcactggaccaggtgctgggccgcttcttcctctaccacatccacctgtggatcagctacatccacctcatgtcccccttcgtggagcacatcctttggcacgtgggcctctcggcctgcctgggcctgacggtggccctgtccctcctctcggacattatcgccctcctcaccttccacatctactgcttttacgtctatggagccaggctgtactgcctgaagatccatggcctgtcctcactgtggcgtctgttccgggggaagaagtggaacgttctgcgccagcgcgtggactcctgttcctatgacctggaccagctgttcatcgggactctgctcttcaccatcctgctcttcctcctgcctaccacagccctgtactacctggtgttcaccctgctccggctcctggtggtcgccgtgcagggcctgatccatctgctggtggacctcatcaactccctgccgctgtactcactgggtcttcggctctgccggccctacaggctggcggctggcgtgaagttccgtgtcctccggcacgaggccagcaggcccctccgcctcctgatgcagataaacccactgccctacagccgcgtggtgcacacctaccgcctccccagctgtggctgccaccccaagcactcctggggcgccctgtgccgcaagctgttccttggggagctcatctacccctggaggcagagaggggacaagcaggactgagggaactgctggctcgcctggcaccaccacacggccacagccagccatctgctctgccagggtggcaccagctcagctggcgcatgtcccgtgctttgtggacgctgctgtgtgctcctgaacacggcaggccctgctatcacaccttgggcttggaggtcattgggagtgagcagatgtgggggtggccagccaggctggccgcactccatcactggcactgcctgccttgggacccgcttcccacctgctgcggtcaccatggtggcgagcacagcaaccccaggtgtccagagcactgccccatgcccaccctgcatacccaggtccagagggtccgtccaccacagcagccccaggtggagggctggtctccctgggggctccccagtggctctgccctggctgtgggggtggagggaccttgccaggatgaaccctccagtcccaggcaccctctagctccctcagccgaacagcaccctgcatctgggggattgaagcagtcgctgacccccgtccccagcgggcccgggccctcactccctgaaccacacggggtttatttgcggatgttccctggagaggtcgctttgtgaagaaaccatcagcaggctgtgagcatcgccaggctgctgtgggggcgggagcagcctcagtgtcaagggcctgcccactgacccagccgtacctattcgtccacggtgccccgtagcagcaggtcctgcggccaaatctgtctcccttcatgggcctcccagggaaggaggaagccctgctgtgcagacacctctgtggccccccaggggtgtgagcggcctggggagggggccgtggcactgaggccgaaagtgcctgccagacggcacggtctgggtgcgggtgttccctgtgagcccgagtccgcttcaggaggggagcctgcaggtgccggctggtgaggggatgacgcgctgtgggtgggaggaggcagcgcccatctcagcagcaccaggactgcctgggactccctggcaacccagcaccggggaagccgtcagctgctgtgacaataaaacctgccccgtgtctgg

SEQ ID NO: 102 - DNA, 2921 bp, Homo sapiens
cagcgagcgccgtcgtctgcccgggcccgcccatcggggtccccaaccccatccggaccccgccgcccgagcgcgcggccccggaagcacccgcctcccggcatggtgctcaaggccttcttccccacgtgctgcgtctcgacggacagcgggctgctggtgggacggtgggtgccggagcagagcagcgccgtggtcctggcggtcctgcactttcccttcatccccatccaggtcaagcagctcctggcccaggtgcggcaggccagccaggtgggcgtggccgtgctgggcacctggtgccactgccggcaggagcccgaggagagcctgggccgcttcctggagagcctgggtgctgtcttcccccatgagccctggctgcggctgtgccgggagagaggcggcacgttctggagctgcgaggccacccaccggcaagcgcccactgcccccggtgcccctggtgaggaccaggtcatgctcatcttctatgaccagcgccaggtgttgctgtcacagctacacctgcccaccgtcctgcccgaccgccaggctggagccaccactgccagcacggggggcctggctgccgtcttcgacacggtagcacgcagtgaggtgctcttccgcagtgaccgctttgatgagggccccgtgcggctgagccactggcagtcggagggcgtggaggccagcatcctcgcggagctggccaggcgagcctcgggacccatttgcctgctgttggccagcctgctgtcgctggtctcagctgtcagtgcctgccgagtgttcaagctctggcccctgtccttcctcgggagcaaactctccacgtgcgaacagctccggcaccggctggagcacctcacgctaatcttcagtacacggaaggcggagaaccctgcccagctgatgaggaaggccaacacggtggcctctgtgctgctggacgtggccctgggcctcatgctgctgtcctggctccacgggagaagccgcatcgggcatctggccgacgccctcgttcctgtggctgaccacgtggccgaggagctccagcatctgctgcagtggctgatgggtgctcccgccgggctcaagatgaaccgtgcactggaccaggtgctgggccgcttcttcctctaccacatccacctgtggatcagctacatccacctcatgtcccccttcgtggagcacatcctttggcacgtgggcctctcggcctgcctgggcctgacggtggccctgtccctcctctcggacattatcgccctcctcaccttccacatctactgcttttacgtctatggagccaggctgtactgcctgaagatccatggcctgtcctcactgtggcgtctgttccgggggaagaagtggaacgttctgcgccagcgcgtggactcctgttcctatgacctggaccagctgttcatcgggactctgctcttcaccatcctgctcttcctcctgcctaccacagccctgtactacctggtgttcaccctgctccggctcctggtggtcgccgtgcagggcctgatccatctgctcgtggacctcatcaactccctgccgctgtactcactgggtcttcggctctgccggccctacaggctggcggctggcgtgaagttccgtgtcctccggcacgaggccggcaggcccctccgcctcctgatgcagataaacccactgccctacagccgcgtggtgcacacctaccgcctccccagctgtggctgccaccccaagcactcctggggcgccctgtgccgcaagctgttccttggggagctcatctacccctggaggcagagaggggacaagcaggactgagggaactgctggctcgcctggcaccaccacacggccacagccagccatctgctctgccagggtggcaccagctcagctggcgcatgtcctgtgctttgtggacgctgctgtgtgctcctgaacacggcaggccctgctatcacaccttgggcttggaggtcattgggagtgagcagatgtgggggtggccagccaggctggccgcactccatcactggcactgcctgccttgggacccgcttcccacctgctgcggtcaccatggtggcgagcacagcaaccccaggtgtccagagcactgccccatgcccaccctgtgtacccaggtccagagggtccgtccaccacagcagccccaggtggagggctggtctccctgggggctccccagtggctctgccctggctgtgggggtggagggaccttgccaggatgaaccccccagtcccaggcaccctctagctccctcagccgaacagcaccctgcatctgggggattgaagcagtcgctgacccccgtccccagcgggcccgggccctcactccctgaaccacacggggtttatttgcggatgttccctggagaggtcgctttgtgaagaaaccatcagcaggctgtgagcatcgccaggctgctgtgggggcgggagcagcctcagtgtcaagggcccgcccactgacccagccgtacctattcgtccacggtgccccgtagcagcaggtcctgcggccaaatctgtctcccttcatgggcctcccagggaaggaggaagccctgctgtgcagacacctctgtggccccccaggagtgtgagtggcctggggagggggccgtggcactgaggccgaaagtgcctgccagacggcacggtctgggtgcgggtgttccctgtgagcccgagtccgcttcaggaggggagcctgcaggtgccggctggtgaggggatgacgcgctgtgggtgggaggaggcagcgcccatctcagcagcaccaggactgcctgggactccctggcaacccagcaccggggaagccgtcagctgctgtgacaataaaacctgccccgtgtctgg

SEQ ID NO: 103 - DNA, 2873 bp, Homo sapiens
ggcacgagggtctgcccgggcccgcccatcggggtccccaaccccatccggaccccgccgcccgagcgcgcggccccggaagcacccgcctcccggcatggtgctcaaggccttcttccccacgtgctgcgtctcgacggacagcgggctgctggtgggacggtgggtgccggagcagagcagcgccgtggtcctggcggtcctgcactttcccttcatccccatccaggtcaagcagctcctggcccaggtgcggcaggccagccaggtgggcgtggccgtgctgggcacctggtgccactgccggcaggagcccgaggagagcctgggccgcttcctggagagcctgggtgctgtcttcccccatgagccctggctgcggctgtgccgggagagaggcggcacgttctggagctgcgaggccacccaccggcaagcgcccactgcccccggtgcccctggtgaggaccaggtcatgctcatcttctatgaccagcgccaggtgttgctgtcacagctacacctgcccaccgtcttgcccgaccgccaggctggagccaccactgccagcacggggggcctggctgccgtcttcgacacggtagcacgcagtgaggtgctcttccgcagtgaccgctttgatgagggccccgtgcggctgagccactggcagtcggagggcgtggaggccagcatcctcgcggagctggccaggcgagcctcgggacccatttgcctgctgttggccagcctgctgtcgctggtctcagctgtcagtgcctgccgagtgttcaagctctggcccctgtccttcctcgggagcaaactctccacgtgcgaacagctccggcaccggctggagcacctcacgctaatcttcagtacacggaaggcggagaaccctgcccagctgatgaggaaggccaacacggtggcctctgtgctgctggacgtggccctgggcctcatgctgctgtcctggctccacgggagaagccgcatcgggcatctggccgacgccctcgttcctgtggctgaccacgtggccgaggagctccagcatctgctgcagtggctgatgggtgctcccgccgggctcaagatgaaccgtgcactggaccaggtgctgggccgcttcttcctctaccacatccacctgtggatcagctacatccacctcatgtcccccttcgtggagcacatcctttggcacgtgggcctctcggcctgcctgggcctgacggtggccctgtccctcctctcggacattatcgccctcctcaccttccacatctactgcttttacgtctatggagccaggctgtactgcctgaagatccatggcctgtcctcactgtggcgtctgttccgggggaagaagtggaacgttctgcgccagcgcgtggactcctgttcctatgacctggaccagctgttcatcgggactctgctcttcaccatcctgctcttcctcctgcctaccacagccctgtactacctggtgttcaccctgctccggctcctggtggtcgccgtgcagggcctgatccatctgctcgtggacctcatcaactccctgccgctgtactcactgggtcttcggctctgccggccctacaggctggcggataaacccactgccctacagccgcgtggtgcacacctaccgcctccccagctgtggctgccaccccaagcactcctggggcgccctgtgccgcaagctgttccttggggagctcatctacccctggaggcagagaggggacaagcaggactgagggaactgctggctcgcctggcaccaccacacggccacagccagccatctgctctgccagggtggcaccagctcagctggcgcatgtcctgtgctttgtggacgctgctgtgtgctcctgaacacggcaggccctgctatcacaccttgggcttggaggtcattgggagtgagcagatgtgggggtggccagccaggctggccgcactccatcactggcactgcctgccttgggacccgcttcccacctgctgcggtcaccatggtggcgagcacagcaaccccaggtgtccagagcactgccccatgcccaccctgtgtacccaggtccagagggtccgtccaccacagcagccccaggtggagggctggtctccctgggggctccccagtggctctgccctggctgtgggggtggagggaccttgccaggatgaaccccccagtcccaggcaccctctagctccctcagccgaacagcaccctgcatctgggggattgaagcagtcgctgacccccgtccccagcgggcccgggccctcactccctgaaccacacggggtttatttgcggatgttccctggagaggtcgctttgtgaagaaaccatcagcaggctgtgagcatcgccaggctgctgtgggggcgggagcagcctcagtgtcaagggcccgcccactgacccagccgtacctattcgtccacggtgccccgtagcagcaggtcctgcggccaaatctgtctcccttcatgggcctcccagggaaggaggaagccctgctgtgcagacacctctgtggccccccaggagtgtgagtggcctggggagggggccgtggcactgaggccgaaagtgcctgccagacggcacggtctgggtgcgggtgttccctgtgagcccgagtccgcttcaggaggggagcctgcaggtgccggctggtgaggggatgacgcgctgtgggtgggaggaggcagcgcccatctcagcagcaccaggactgcctgggactccctggcaacccagcaccggggaagccgtcagctgctgtgacaataaaacctgccccgtgtctggaaaaaaaaaaaaaaaaaaa

SEQ ID NO: 104 - DNA, 2136 bp, Homo sapiens
ggcacgaggcccgccgcccgagcgcgcggccccggaagcacccgcctcccggcatggtgctcaaggccttcttccccacgtgctgcgtctcggcggacagcgggctgctggtgggacggtgggtgccggagcagagcagcgccgtggtcctggcggtcctgcactttcccttcatccccatccaggtcaagcagctcctggcccaggtgcggcaggccagccaggtgggcgtggccgtgctgggcacctggtgccactgccggcaggagcccgaggagagcctgggccgcttcctggagagcctgggtgctgtcttcccccatgagccctggctgcggctgtgccgggagagaggcggcacgttctggagctgcgaggccacccaccggcaagcgcccactgcccccggtgcccctggtgaggaccaggtcatgctcatcttctatgaccagcgccaggtgttgctgtcacagctacacctgcccaccgtcctgcccgaccgccaggctggagccaccactgccagcacggggggcctggctgccgtcttcgacacggtagcacgcagtgaggtgctcttccgcagtgaccgctttgatgagggccccgtgcggctgagccactggcagtcggagggcgtggaggccagcatcctcgcggagctggccaggcgagcctcgggacccatttgtctgctgttggccagcctgctgtcgctggtctcagctgtcagtgcctgccgagtgttcaagctctggcccctgtccttcctcgggagcaaactctccacgtgcgaacagctccggcaccggctggagcacctcacgctaatcttcagtacacggaaggcggagaaccctgcccagctgatgaggtgtgggcctgccctggtctctgcagggctgggtgcgtgccctctggccccttctccatccccctctgcaccacgctgacccctccggccaggcaggcctcctcctgcggccccaggctgtgctggccaccctcatgccggccgggccggacctcccttccaggaaggccaacacggtggcctctgtgctgctggacgtggccctgggcctcatgctgctgtcctggctccacgggagaagccgcatcgggcatctggccgacgccctcgttcctgtggctgacgtgagtggactggggtggagcccggtgtcccgggtgggcgtggggacccctcctgggcagcagagccttcccgggccagagccaccgccccccaaagccagttctaccttctccatgctctggagacacggccctcccctgaaccagaagcaggaactccaggggcgctggggcctgggcagggcaggcctcgcaggtacacccccctttccttctgaaggggctgtgtgcaggagccagccgggctgaggctctggggagcccgcctctccctgtgggcccagcgtcctggtatctcccttgtggtccctgagatcagcgttgccctcctggctctctggggccctctgcagagccagggtcatgaaacctttcctgtccagggaggcccatgtgcagcccagctgggacttcctgccctgcccctgtgctgattctgtaactcctgtgctgagagccagaggcacagcttgtctcccatctcccaccttccctgcatggtctgtgccccgtttccagccgggtgcagccccctcctctgcagatctagtgcatttccatgctgcctctgggccttcagcttctctgtcttcctccctcagcaccaaagccccgtctcttccattaggagcttgtcttcctgctgggggtggtacctgactctttggcccaccctcgggcctctgtggaggcctccttgaggcctgactgggtgggtcttgtgtgggctgcaggtgtgcactgggcctgcttgtggccaggccaggcctctgggggcagcatcaggcacgtctgtgtggctgtgggggtgcagggagctccagcccagaaggaaggaggggcggggctggggaaggggctcggcagctttgcctgtggtcgtccgcacctgccaccggcctactttgtcctagacctcccttttgcaaaagtgctcagaaatataaatatttaatttaaaaaaaaaaaaaaaaaaaa

SEQ ID NO: 105 - DNA, 2198 bp, Homo sapiens
ctatggagccaggctgtactgcctgaagatccatggcctgtcctcactgtggcgtctgttccgggggaagaagtggaacgttctgcgccagcgcgtggactcctgttcctatgacctggaccagctgttcatcgggactctgctcttcaccatcctgctcttcctcctgcctaccacagccctgtactacctggtgttcaccctggtgagctgagcacccacaggctgggcctggctgcagtgctctgtgtggcttctgccagcgctgcctgggagcagtcagctgtggggcgggctgtctcctgctgcaggccacgtgggtggcctttcaggaccctctgggcagtgagtgctgcgctctggagtgggcgaggccctatcctggccagtaagacaccctcactgccctggagcacgcagctgggtgcgtggtggaaggaccccacggcaggtggggtcacgcaagaggcctcccctggtgcctggcactggggcagacagtgggaggtgagcagaaccacctccagcacctgcttgattcccaggcctcgatcccctctgcatgtgaggctgtggggaggcacctctgacctggtgagagggccgggtgctccgcctccagctttgctccagagcaaggcccaatggcagactccgtgccctgctcagggtggggtccctgctctccccaggaccctgcagcctctgggcccccttcatcgtggcccaggatggggtcggactgctctgcccccaggcgcgtctggccgggccggtcctaaatgctcctctgccacagctccggctcctggtggtcgccgtgcagggcctgatccatctgctcgtggacctcatcaactccctgccgctgtactcactgggtcttcggctctgccggccctacaggctggcggctggcgtgaagttccgtgtcctccggcacgaggccggcaggcccctccgcctcctgatgcagataaacccactgccctacagccgcgtggtgcatacctaccgcctccccagctgtggctgccaccccaagcactcctggggcgccctgtgccgcaagctgttccttggggagctcatctacccctggaggcagagaggggacaagcaggactgagggaactgctggctcgcctggcaccaccacacggccacagccagccatctgctctgccagggtggcaccagctcagctggcgcatgtcctgtgctttgtggacgctgctgtgtgctcctgaacgcggcaggccctgctatcacaccttgggcttggaggtcattgggagtgagcagatgtgggggtggccagccaggctggccgcactccatggcactgcctgccttgggacccgcttcccacctgctgcggtcaccatggtggcgagcacagcaaccccaggtgtccagagcactgccccatgcccaccctgtgtacccaggtccagagggtccgtccaccacagcagccccaggtggagggctggtctccctgggggctccccagtggctctgccctggctgtaggggtggagggaccttgccaggatgaaccccccagtcccaggcaccctctagctccctcagccgaacagcaccctgcatctgggggattgaagcagtcgctgacccccgtccccagcgggcccgggccctcactccctgaaccacacggggtttatttgcggatgttccctggagaggtcgctttgtgaagaaaccatcagcaggctgtgagcatcgccaggctgctgtgggggcgggagcagcctcagtgtcaagggcccgcccactgacccagccgtacctattcgtccacggtgccccgtagcagcaggtcctgcggccaaatctgtctcccttcatgggcctcccagggaaggaggaagccctgctgtgcagacacctctgtggccccccaggagtgtgagtggcctggggagggggccgtggcactgaggccgaaagtgcctgccagacggcacggtctgggtgcgggtgttccctgtgagcccgagtccgcttcaggaggggagcctgcaggtgccggctggtgaggggatgacgcgctgtgggtgggaggaggcagcgcccatctcagcagcaccaggactgcctgggactccctggcaacccagcaccggggaagccgtcagctgctgtgacaataaaacctgccccgtgtctgg

SEQ ID NO: 106 - DNA, 1782 bp, Homo sapiens
ggcctttttttttttttttttttttttgagatggagtcttgctctttttgcccaggctggagtgcaatggtgtgatctcagctcactgcaaccttcgcctccctggttgaagcgattctcctgcctcagcctcccaagtagctgagattacaggcacacgccatcacacccggctaatttttgtatttttagtacgtatggggtttcaccatgttggccaggctggtcttgaactcctgacctcatgatccgcccacctcccaaaatgctgggattacaggcgtgagccaccgtgcctggctgcaggaggctttgatgccggcctggcagccagctccaggagttgggcgacggagggggcggggagagcttcgtgggtggccacggccagcagcacccgggtgcccctcagagaggaaggtacctgcagcctctgctcatgtgtggggccagcccccacgcgtcccctcgtcagccgcttgctatccttgcagctggcgtgaagttccgtgtcctccggcacgaggccggcaggcccctccgcctcctgatgcagataaacccactgccctacagccgcgtggtgcacacctaccgcctccccagctgtggctgccaccccaagcactcctggggcgccctgtgccgcaagctgttccttggggagctcatctacccctggaggcagagaggggacaagcaggactgagggaactgctggctcgcctggcaccaccacacggccacagccagccatctgctctgccagggtggcaccagctcagctggcgcatgtcctgtgctttgtggacgctgctgtgtgctcctgaacacggcaggccctgctatcacaccttgggcttggaggtcattgggagtgagcagatgtgggggtggccagccaggctggccgcactccatcactggcactgcctgccttgggacccgcttcccacctgctgcggtcaccatggtggcgagcacagcaaccccaggtgtccagagcactgccccatgcccaccctgtgtacccaggtccagagggtccgtccaccacagcagccccaggtggagggctggtctccctgggggctccccagtggctctgccctggctgtgggggtggagggaccttgccaggatgaaccccccagtcccaggcaccctctagctccctcagccgaacagcaccctgcatctgggggattgaagcagtcgctgacccccgtccccagcgggcccgggccctcactccctgaaccacacggggtttatttgcggatgttccctggagaggtcgctttgtgaagaaaccatcagcaggctgtgagcatcgccaggctgctgtgggggcgggagcagcctcagtgtcaagggcccgcccactgacccagccgtacctattcgtccacggtgccccgtagcagcaggtcctacggccaaatctgtctcccttcatgggcctcccagggaaggaggaagccctgctgtgcagacacctctgtggccccccaggagtgtgagtggcctggggagggggccgtggcactgaggccgaaagtgcctgccagacggcacggtctgggtgcgggtgtcccctgtgagcccgagtccgcttcaggaggggagcctgcaggtgccggctggtgaggggatgacgcactgtgggtgggaggaggcagcgcccatctcagcagcaccaggactgcctgggactccctggcaacccagcaccggggaagccgtcagctgctgtgacaataaaacctgccccgtgtctgg

SEQ ID NO: 107 - DNA, 2878 bp, Homo sapiens
cagcgagcgccgtcgtctgcccgggcccgcccatcggggtccccaaccccatccggaccccgccgcccgagcgcgcggccccggaagcacccgcctcccggcatggtgctcaaggccttcttccccacgtgctgcgtctcgacggacagcgggctgctggtgggacggtgggtgccggagcagagcagcgccgtggtcctggcggtcctgcactttcccttcatccccatccaggtcaagcagctcctggcccaggtgcggcaggccagccaggtgggcgtggccgtgctgggcacctggtgccactgccggcaggagcccgaggagagcctgggccgcttcctggagagcctgggtgctgtcttcccccatgagccctggctgcggctgtgccgggagagaggcggcacgttctggagctgcgaggccacccaccggcaagcgcccactgcccccggtgcccctggtgaggaccaggtcatgctcatcttctatgaccagcgccaggtgttgctgtcacagctacacctgcccaccgtcctgcccgaccgccaggctggagccaccactgccagcacggggggcctggctgccgtcttcgacacggtagcacgcagtgaggtgctcttccgcagtgaccgctttgatgagggccccgtgcggctgagccactggcagtcggagggcgtggaggccagcatcctcgcggagctggccaggcgagcctcgggacccatttgcctgctgttggccagcctgctgtcgctggtctcagctgtcagtgcctgccgagtgttcaagctctggcccctgtccttcctcgggagcaaactctccacgtgcgaacagctccggcaccggctggagcacctcacgctaatcttcagtacacggaaggcggagaaccctgcccagctgatgaggaaggccaacacggtggcctctgtgctgctggacgtggccctgggcctcatgctgctgtcctggctccacgggagaagccgcatcgggcatctggccgacgccctcgttcctgtggctgaccacgtggccgaggagctccagcatctgctgcagtggctgatgggtgctcccgccgggctcaagatgaaccgtgcactggaccaggtgctgggccgcttcttcctctaccacatccacctgtggatcagctacatccacctcatgtcccccttcgtggagcacatcctttggcacgtgggcctctcggcctgcctgggcctgacggtggccctgtccctcctctcggacattatcgccctcctcaccttccacatctactgcttttacgtctatggagccaggctgtactgcctgaagatccatggcctgtcctcactgtggcgtctgttccgggggaagaagtggaacgttctgcgccagcgcgtggactcctgttcctatgacctggaccagctgttcatcgggactctgctcttcaccatcctgctcttcctcctgcctaccacagccctgtactacctggtgttcaccctgctccggctcctggtggtcgccgtgcagggcctgatccatctgctcgtggacctcatcaactccctgccgctgtactcactgggtcttcggctctgccggccctacaggctggcggataaacccactgccctacagccgcgtggtgcacacctaccgcctccccagctgtggctgccaccccaagcactcctggggcgccctgtgccgcaagctgttccttggggagctcatctacccctggaggcagagaggggacaagcaggactgagggaactgctggctcgcctggcaccaccacacggccacagccagccatctgctctgccagggtggcaccagctcagctggcgcatgtcctgtgctttgtggacgctgctgtgtgctcctgaacacggcaggccctgctatcacaccttgggcttggaggtcattgggagtgagcagatgtgggggtggccagccaggctggccgcactccatcactggcactgcctgccttgggacccgcttcccacctgctgcggtcaccatggtggcgagcacagcaaccccaggtgtccagagcactgccccatgcccaccctgtgtacccaggtccagagggtccgtccaccacagcagccccaggtggagggctggtctccctgggggctccccagtggctctgccctggctgtgggggtggagggaccttgccaggatgaaccccccagtcccaggcaccctctagctccctcagccgaacagcaccctgcatctgggggattgaagcagtcgctgacccccgtccccagcgggcccgggccctcactccctgaaccacacggggtttatttgcggatgttccctggagaggtcgctttgtgaagaaaccatcagcaggctgtgagcatcgccaggctgctgtgggggcgggagcagcctcagtgtcaagggcccgcccactgacccagccgtacctattcgtccacggtgccccgtagcagcaggtcctgcggccaaatctgtctcccttcatgggcctcccagggaaggaggaagccctgctgtgcagacacctctgtggccccccaggagtgtgagtggcctggggagggggccgtggcactgaggccgaaagtgcctgccagacggcacggtctgggtgcgggtgttccctgtgagcccgagtccgcttcaggaggggagcctgcaggtgccggctggtgaggggatgacgcgctgtgggtgggaggaggcagcgcccatctcagcagcaccaggactgcctgggactccctggcaacccagcaccggggaagccgtcagctgctgtgacaataaaacctgccccgtgtctggaaaaaaaaaaaaaaaaaaa

SEQ ID NO: 108 - DNA, 2890 bp, Homo sapiens
catcggggtccccaaccccatccggaccccgccgcccgagcgcgcggccccggaagcacccgcctcccggcatggtgctcaaggccttcttccccacgtgctgcgtctcggcggacagcgggctgctggtgggacggtgggtgccggagcagagcagcgccgtggtcctggcggtcctgcactttcccttcatccccatccaggtcaagcagctcctggcccaggtgcggcaggccagccaggtgggcgtggccgtgctgggcacctggtgccactgccggcaggagcccgaggagagcctgggccgcttcctggagagcctgggtgctgtcttcccccatgagccctggctgcggctgtgccgggagagaggcggcacgttctggagctgcgaggccacccaccggcaagcgcccactgcccccggtgcccctggtgaggaccaggtcatgctcatcttctatgaccagcgccaggtgttgctgtcacagctacacctgcccaccgtcctgcccgaccgccaggctggagccaccactgccagcacggggggcctggctgccgtcttcgacacggtagcacgcagtgaggtgctcttccgcagtgaccgctttgatgagggccccgtgcggctgagccactggcagtcggagggcgtggaggccagcatcctcgcggagctggccaggcgagcctcgggacccatttgtctgctgttggccagcctgctgtcgctggtctcagctgtcagtgcctgccgagtgttcaagctctggcccctgtccttcctcgggagcaaactctccacgtgcgaacagctccggcaccggctggagcacctcacgctaatcttcagtacacggaaggcggagaaccctgcccagctgatgaggaaggccaacacggtggcctctgtgctgctggacgtggccctgggcctcatgctgctgtcctggctccacgggagaagccgcatcgggcatctggccgacgccctcgttcctgtggctgaccacgtggccgaggagctccagcatctgctgcagtggctgatgggtgctcccgccgggctcaagatgaaccgtgcactggaccaggtgctgggccgcttcttcctctaccacatccacctgtggatcagctacatccacctcatgtcccccttcgtggagcacatcctttggcacgtgggcctctcggcctgcctgggcctgacggtggccctgtccctcctctcggacattatcgccctcctcaccttccacatctactgcttttacgtctatggagccaggctgtactgcctgaagatccatggcctgtcctcactgtggcgtctgttccgggggaagaagtggaacgttctgcgccagcgcgtggactcctgttcctatgacctggaccagctgttcatcgggactctgctcttcaccatcctgctcttcctcctgcctaccacagccctgtactacctggtgttcaccctgctccggctcctggtggtcgccgtgcagggcctgatccatctgctggtggacctcatcaactccctgccgctgtactcactgggtcttcggctctgccggccctacaggctggcggctggcgtgaagttccgtgtcctccggcacgaggccagcaggcccctccgcctcctgatgcagataaacccactgccctacagccgcgtggtgcacacctaccgcctccccagctgtggctgccaccccaagcactcctggggcgccctgtgccgcaagctgttccttggggagctcatctacccctggaggcagagaggggacaagcaggactgagggaactgctggctcgcctggcaccaccacacggccacagccagccatctgctctgccagggtggcaccagctcagctggcgcatgtcccgtgctttgtggacgctgctgtgtgctcctgaacacggcaggccctgctatcacaccttgggcttggaggtcattgggagtgagcagatgtgggggtggccagccaggctggccgcactccatcactggcactgcctgccttgggacccgcttcccacctgctgcggtcaccatggtggcgagcacagcaaccccaggtgtccagagcactgccccatgcccaccctgcatacccaggtccagagggtccgtccaccacagcagccccaggtggagggctggtctccctgggggctccccagtggctctgccctggctgtgggggtggagggaccttgccaggatgaaccctccagtcccaggcaccctctagctccctcagccgaacagcaccctgcatctgggggattgaagcagtcgctgacccccgtccccagcgggcccgggccctcactccctgaaccacacggggtttatttgcggatgttccctggagaggtcgctttgtgaagaaaccatcagcaggctgtgagcatcgccaggctgctgtgggggcgggagcagcctcagtgtcaagggcctgcccactgacccagccgtacctattcgtccacggtgccccgtagcagcaggtcctgcggccaaatctgtctcccttcatgggcctcccagggaaggaggaagccctgctgtgcagacacctctgtggccccccaggggtgtgagcggcctggggagggggccgtggcactgaggccgaaagtgcctgccagacggcacggtctgggtgcgggtgttccctgtgagcccgagtccgcttcaggaggggagcctgcaggtgccggctggtgaggggatgacgcgctgtgggtgggaggaggcagcgcccatctcagcagcaccaggactgcctgggactccctggcaacccagcaccggggaagccgtcagctgctgtgacaataaaacctgccccgtgtctgg

SEQ ID NO: 109 - DNA, 1718 bp, Homo sapiens
cccacgcgtccgcccacgcgtccgggttcccccccttccccttccccggggtctgggggtgacattgcaccgcgcccctcgtggggtcgcgttgccaccccacgcggactccccagctggcgcgcccctcccatttgcctgtcctggtcaggcccccaccccccttcccacctgaccagccatgggggctgcggtgtttttcggctgcactttcgtcgcgttcggcccggccttcgcgcttttcttgatcactgtggctggggacccgcttcgcgttatcatcctggtcgcaggggcatttttctggctggtctccctgctcctggcctctgtggtctggttcatcttggtccatgtgaccgaccggtcagatgcccggctccagtacggcctcctgatttttggtgctgctgtctctgtccttctacaggaggtgttccgctttgcctactacaagctgcttaagaaggcagatgaggggttagcatcgctgagtgaggacggaagatcacccatctccatccgccagatggcctatgtttctggtctctccttcggtatcatcagtggtgtcttctctgttatcaatattttggctgatgcacttgggccaggtgtggttgggatccatggagactcaccctattacttcctgacttcagcctttctgacagcagccattatcctgctccataccttttggggagttgtgttctttgatgcctgtgagaggagacggtactgggctttgggcctggtggttgggagtcacctactgacatcgggactgacattcctgaacccctggtatgaggccagcctgctgcccatctatgcagtcactgtttccatggggctctgggccttcatcacagctggagggtccatccgaagtattcagcgcagcctcttgtgccgacggcaggaggacagtcgggtgatggtgtattctgccctgcgcatcccacccgaggactgagggaacctaggggggacccctgggcctggggtgccctcctgatgtcctcgccctgtatttctccatctccagttctggacagtgcaggttgccaagaaaagggacctagtttagccattgccctggagatgaaattaatggaggctcaaggatagatgagctctgagtttctcagtactccctcaagactggacatcttggtctttttctcaggcctgagggggaaccatttttggtgtgataaataccctaaactgcctttttttcttttttgaggtggggggagggaggaggtatattggaactcttctaacctccttgggctatattttctctcctcgagttgctcctcatggctgggctcatttcggtccctttctccttggtcccagaccttgggggaaaggaaggaagtgcatgtttgggaactggcattactggaactaatggttttaacctccttaaccaccagcatccctcctctccccaaggtgaagtggagggtgctgtggtgagctggccactccagagctgcagtgccactggaggagtcagactaccatgacatcgtagggaaggaggggagatttttttgtagtttttaattggggtgtgggaggggcggggaggttttctataaactgtatcattttctgctgagggtggagtgtcccatccttttaatcaaggtgattgtgattttgactaataaaaaagaatttgtaaaaaaaaaaaaaaa

SEQ ID NO: 110 - DNA, 1967 bp, Homo sapiens
gtggggtcgcgttgccaccccacgcggactccccagctggcgcgcccctcccatttgcctgtcctggtcaggcccccaccccccttcccacctgaccagccatgggggctgcggtgtttttcggctgcactttcgtcgcgttcggcccggccttcgcgcttttcttgatcactgtggctggggacccgcttcgcgttatcatcctggtcgcaggggcatttttctggctggtctccctgctcctggcctctgtggtctggttcatcttggtccatgtgaccgaccggtcagatgcccggctccagtacggcctcctgatttttggtgctgctgtctctgtccttctacaggaggtgttccgctttgcctactacaagctgcttaagaaggcagatgaggggttagcatcgctgagtgaggacggaagatcacccatctccatccgccagatggcctatgtttctggtctctccttcggtatcatcagtggtgtcttctctgttatcaatattttggctgatgcacttgggccaggtgtggttgggatccatggagactcaccctattacttcctgacttcagcctttctgacagcagccattatcctgctccataccttttggggagttgtgttctttgatgcctgtgagaggagacggtactgggctttgggcctggtggttgggagtcacctactgacatcgggactgacattcctgaacccctggtatgaggccagcctgctgcccatctatgcagtcactgtttccatggggctctgggccttcatcacagctggagggtccctccgaagtattcagcgcagctcttgtgtaaggactgactacctggactgatcgcctgacagatcccacctgcctgtccactgcccatgactgagcccagccccagcccggggtccattgcccacattctctgtctccttctcgtcggtctaccccactacctccagggttttgctttgtccttttgtgaccgttagtctctaagctttaccaggagcagcctgggttcagccagtcagtgactggtgggtttgaatctgcacttatccccaccacctggggacccccttgttgtgtccaggactccccctgtgtcagtgctctgctctcaccctgcccaagactcacctcccttcccctctgcaggccgacggcaggaggacagtcgggtgatggtgtattctgccctgcgcatcccacccgaggactgagggaacctaggggggacccctgggcctggggtgccctcctgatgtcctcgccctgtatttctccatctccagttctggacagtgcaggttgccaagaaaagggacctagtttagccattgccctggagatgaaattaatggaggctcaaggatagatgagctctgagtttctcagtactccctcaagactggacatcttggtctttttctcaggcctgagggggaaccatttttggtgtgataaataccctaaactgcctttttttcttttttgaggtggggggagggaggaggtatattggaactcttctaacctccttgggctatattttctctcctcgagttgctcctcatggctgggctcatttcggtccctttctccttggtcccagaccttgggggaaaggaaggaagtgcatgtttgggaactggcattactggaactaatggttttaacctccttaaccaccagcatccctcctctccccaaggtgaagtggagggtgctgtggtgagctggccactccagagctgcagtgccactggaggagtcagactaccatgacatcgtagggaaggaggggagatttttttgtagtttttaattggggtgtgggaggggcggggaggttttctataaactgtatcattttctgctgagggtggagtgtcccatccttttaatcaaggtgattgtgattttgactaataaaaaagaatttgtaaaaaa

SEQ ID NO: 111 - DNA, 1967 bp, Homo sapiens; identical to SEQ ID NO: 110

SEQ ID NO: 112 - DNA, 1966 bp, Homo sapiens
atttggggtttcggttcccccccttccccttccccggggtctgggggtgacattgcaccgcgcccctcgtggggtcgcgttgccaccccacgcggactccccagctggcgcgcccctcccatttgcctgtcctggtcaggcccccaccccccttcccacctgaccagccatgggggctgcggtgtttttcggctgcactttcgtcgcgttcggcccggccttcgcgcttttcttgatcactgtggctggggacccgcttcgcgttatcatcctggtcgcaggggcatttttctggctggtctccctgctcctggcctctgtggtctggttcatcttggtccatgtgaccgaccggtcagatgcccggctccagtacggcctcctgatttttggtgctgctgtctctgtccttctacaggaggtgttccgctttgcctactacaagctgcttaagaaggcagatgaggggttagcatcgctgagtgaggacggaagatcacccatctccatccgccagatggcctatgtttctggtctctccttcggtatcatcagtggtgtcttctctgttatcaatattttggctgatgcacttgggccaggtgtggttgggatccatggagactcaccctattacttcctgacttcagcctttctgacagcagccattatcctgctccataccttttggggagttgtgttctttgatgcctgtgagaggagacggtactgggctttgggcctggtggttgggagtcacctactgacatcgggactgacattcctgaacccctggtatgaggccagcctgctgcccatctatgcagtcactgtttccatggggctctgggccttcatcacagctggagggtccctccgaagtattcagcgcagcctcttgtgtaaggactgactacctggactgatcgcctgacagatcccacctgcctgtccactgcccatgactgagcccagccccagcccgggtccattgcccacattctctgtctccttctcgtcggtctaccccactacctccagggttttgctttgtccttttgtgaccgttagtctctaagctttaccaggagcagcctgggttcagccagtcagtgactggtgggtttgaatctgcacttatccccaccacctggggacccccttgttgtgtccaggactccccctgtgtcagtgctctgctctcaccctgcccaagactcacctcccttcccctctgcaggccgacggcaggaggacagtcgggtgatggtgtattctgccctgcgcatcccacccgaggactgagggaacctaggggggacccctgggcctggggtgccctcctgatgtcctcgccctgtatttctccatctccagttctggacagtgcaggttgccaagaaaagggacctagtttagccattgccctggagatgaaattaatggaggctcaaggatagatgagctctgagtttctcagtactccctcaagactggacatcttggtctttttctcaggcctgagggggaaccatttttggtgtgataaataccctaaactgcctttttttcttttttgaggtggggggagggaggaggtatattggaactcttctaacctccttgggctatattttctctcctcgagttgctcctcatggctggactcatttcggtccctttctccttggtcccagaccttgggggaaaggaaggaagtgcatgtttgggaactggcattactggaactaatggttttaacctccttaaccaccagcatccctcctctccccaaggtgaagtggagggtgctgtggtgagctggccactccagagctgcagtgccactggaggagtcagactaccatgacatcgtagggaaggaggggagatttttttgtagtttttaattggggtgtgggaggggcggggaggttttctataaactgtatcattttctgctgag

SEQ ID NO: 113 - DNA, 2067 bp, Homo sapiens
ggcacgagggttcccccccttccccttccccggggtctgggggtgacattgcaccgcgcccctcgtggggtcgcgttgccaccccacgcggactccccagctggcgcgcccctcccatttgcctgtcctggtcaggcccccaccccccttcccacctgaccagccatgggggctgcggtgtttttcggctgcactttcgtcgcgttcggcccggccttcgcgcttttcttgatcactgtggctggggacccgcttcgcgttatcatcctggtcgcaggggcatttttctggctggtctccctgctcctggcctctgtggtctggttcatcttggtccatgtgaccgaccggtcagatgcccggctccagtacggcctcctgatttttggtgctgctgtctctgtccttctacaggaggtgttccgctttgcctactacaagctgcttaagaaggcagatgaggggttagcatcgctgagtgaggacggaagatcacccatctccatccgccagatggcctatgtttctggtctctccttcggtatcatcagtggtgtcttctctgttatcaatattttggctgatgcacttgggccaggtgtggttgggatccatggagactcaccctattacttcctgacttcagcctttctgacagcagccattatcctgctccataccttttggggagttgtgttctttgatgcctgtgagaggagacggtactgggctttgggcctggtggttgggagtcacctactgacatcgggactgacattcctgaacccctggtatgaggccagcctgctgcccatctatgcagtcactgtttccatggggctctgggccttcatcacagctggagggtccctccgaagtattcagcgcagcctcttgtgtaaggactgactacctggactgatcgcctgacagatcccacctgcctgtccactgcccatgactgagcccagccccagcccgggtccattgcccacattctctgtctccttctcgtcggtctaccccactacctccagggttttgctttgtccttttgtgaccgttagtctctaagctttaccaggagcagcctgggttcagccagtcagtgactggtgggtttgaatctgcacttatccccaccacctggggacccccttgttgtgtccaggactccccctgtgtcagtgctctgctctcaccctgcccaagactcacctcccttcccctctgcaggccgacggcaggaggacagtcgggtgatggtgtattctgccctgcgcatcccacccgaggactgagggaacctaggggggacccctgggcctggggtgccctcctgatgtcctcgccctgtatttctccatctccagttctggacagtgcaggttgccaagaaaagggacctagtttagccattgccctggagatgaaattaatggaggctcaaggatagatgagctctgagtttctcagtactccctcaagactggacatcttggtctttttctcaggcctgagggggaaccatttttggtgtgataaataccctaaactgcctttttttcttttttgaggtggggggagggaggaggtatattggaactcttctaacctccttgggctatattttctctcctcgagttgctcctcatggctgggctcatttcggtccctttctccttggtcccagaccttgggggaaaggaaggaagtgcatgtttgggaactggcattactggaactaatggttttaacctccttaaccaccagcatccctcctctccccaaggtgaagtggagggtgctgtggtgagctggccactccagagctgcagtgccactggaggagtcagactaccatgacatcgtagggaaggaggggagatttttttgtagtttttaattggggtgtgggaggggcggggaggttttctataaactgtatcattttctgctgagggtggagtgtcccatccttttaatcaaggtgattgtgattttgactaataaaaaagaatttgtaaaaaaaaaaaaaaaaaaaaaaaaaaaaaaaaaaaaaaaaaa

SEQ ID NO: 114 - DNA, 2077 bp, Homo sapiens
ggcacgagggaggaagtggcgcggaccttcatttggggtttcggttcccccccttccccttccccggggtctgggggtgacattgcaccgcgcccctcgtggggtcgcgttgccaccccacgcggactccccagctggcgcgcccctcccatttgcctgtcctggtcaggcccccaccccccttcccacctgaccagccatgggggctgcggtgtttttcggctgcactttcgtcgcgttcggcccggccttcgcgcttttcttgatcactgtggctggggacccgcttcgcgttatcatcctggtcgcaggggcatttttctggctggtctccctgctcctggcctctgtggtctggttcatcttggtccatgtgaccgaccggtcagatgcccggctccagtacggcctcctgatttttggtgctgctgtctctgtccttctacaggaggtgttccgctttgcctactacaagctgcttaagaaggcagatgaggggttagcatcgctgagtgaggacggaagatcacccatctccatccgccagatggcctatgtttctggtctctccttcggtatcatcagtggtgtcttctctgttatcaatattttggctgatgcacttgggccaggtgtggttgggatccatggagactcaccctattacttcctgacttcagcctttctgacagcagccattatcctgctccataccttttggggagttgtgttctttgatgcctgtgagaggagacggtactgggctttgggcctggtggttgggagtcacctactgacatcgggactgacattcctgaacccctggtatgaggccagcctgctgcccatctatgcagtcactgtttccatggggctctgggccttcatcacagctggagggtccctccgaagtattcagcgcagcctcttgtgtaaggactgactacctggactgatcgcctgacagatcccacctgcctgtccactgcccatgactgagcccagccccagcccgggtccattgcccacattctctgtctccttctcgtcggtctaccccactacctccagggttttgctttgtccttttgtgaccgttagtctctaagctttaccaggagcagcctgggttcagccagtcagtgactggtgggtttgaatctgcacttatccccaccacctggggacccccttgttgtgtccaggactccccctgtgtcagtgctctgctctcaccctgcccaagactcacctcccttcccctctgcaggccgacggcaggaggacagtcgggtgatggtgtattctgccctgcgcatcccacccgaggactgagggaacctaggggggacccctgggcctggggtgccctcctgatgtcctcgccctgtatttctccatctccagttctggacagtgcaggttgccaagaaaagggacctagtttagccattgccctggagatgaaattaatggaggctcaaggatagatgagctctgagtttctcagtactccctcaagactggacatcttggtctttttctcaggcctgagggggaaccatttttggtgtgataaataccctaaactgcctttttttcttttttgaggtggggggagggaggaggtatattggaactcttctaacctccttgggctatattttctctcctcgagttgctcctcatggctgggctcatttcggtccctttctccttggtcccagaccttgggggaaaggaaggaagtgcatgtttgggaactggcattactggaactaatggttttaacctccttaaccaccagcatccctcctctccccaaggtgaagtggagggtgctgtggtgagctggccactccagagctgcagtgccactggaggagtcagactaccatgacatcgtagggaaggaggggagatttttttgtagtttttaattggggtgtgggaggggcggggaggttttctataaactgtatcattttctgctgagggtggagtgtcccatccttttaatcaaggtgattgtgattttgactaataaaaaagaatttgtaaaaaaaaaaaaaaaaaa

SEQ ID NO: 115 - DNA, 1708 bp, Homo sapiens
ggcacgaggcggttcccccccttccccttccccggggtctgggggtgacattgcaccgcgcccctcgtggggtcgcgttgccaccccacgcggactccccagctggcgcgcccctcccatttgcctgtcctggtcaggcccccaccccccttcccacctgaccagccatgggggctgcggtgtttttcggctgcactttcgtcgcgttcggcccggccttcgcgcttttcttgatcactgtggctggggacccgcttcgcgttatcatcctggtcgcaggggcatttttctggctggtctccctgctcctggcctctgtggtctggttcatcttggtccatgtgaccgaccggtcagatgcccggctccagtacggcctcctgatttttggtgctgctgtctctgtccttctacaggaggtgttccgctttgcctactacaagctgcttaagaaggcagatgaggggttagcatcgctgagtgaggacggaagatcacccatctccatccgccagatggcctatgtttctggtctctccttcggtatcatcagtggtgtcttctctgttatcaatattttggctgatgcacttgggccaggtgtggttgggatccatggagactcaccctattacttcctgacttcagcctttctgacagcagccattatcctgctccataccttttggggagttgtgttctttgatgcctgtgagaggagacggtactgggctttgggcctggtggttgggagtcacctactgacatcgggactgacattcctgaacccctggtatgaggccagcctgctgcccatctatgcagtcactgtttccatggggctctgggccttcatcacagctggagggtccctccgaagtattcagcgcagcctcttgtgccgacggcaggaggacagtcgggtgatggtgtattctgccctgcgcatcccacccgaggactgagggaacctaggggggacccctgggcctggggtgccctcctgatgtcctcgccctgtatttctccatctccagttctggacagtgcaggttgccaagaaaagggacctagtttagccattgccctggagatgaaattaatggaggctcaaggatagatgagctctgagtttctcagtactccctcaagactggacatcttggtctttttctcaggcctgagggggaaccatttttggtgtgataaataccctaaactgcctttttttcttttttgaggtggggggagggaggaggtatattggaactcttctaacctccttgggctatattttctctcctcgagttgctcctcatggctgggctcatttcggtccctttctccttggtcccagaccttgggggaaaggaaggaagtgcatgtttgggaactggcattactggaactaatggttttaacctccttaaccaccagcatccctcctctccccaaggtgaagtggagggtgctgtggtgagctggccactccagagctgcagtgccactggaggagtcagactaccatgacatcgtagggaaggaggggagatttttttgtagtttttaattggggtgtgggaggggcggggaggttttctataaactgtatcattttctgctgagggtggagtgtcccatccttttaatcaaggtgattgtgattttgactaataaaaaagaatttgtaaaaaaaaaaaaaaaaaaa

SEQ ID NO: 116 - DNA, 2010 bp, Homo sapiens
cggggtctgggggtgacattgcaccgcgcccctcgtggggtcgcgttgccaccccacgcggactccccagctggcgcgcccctcccatttgcctgtcctggtcaggcccccaccccccttcccacctgaccagccatgggggctgcggtgtttttcggctgcactttcgtcgcgttcggcccggccttcgcgcttttcttgatcactgtggctggggacccgcttcgcgttatcatcctggtcgcaggggcatttttctggctggtctccctgctcctggcctctgtggtctggttcatcttggtccatgtgaccgaccggtcagatgcccggctccagtacggcctcctgatttttggtgctgctgtctctgtccttctacaggaggtgttccgctttgcctactacaagctgcttaagaaggcagatgaggggttagcatcgctgagtgaggacggaagatcacccatctccatccgccagatggcctatgtttctggtctctccttcggtatcatcagtggtgtcttctctgttatcaatattttggctgatgcacttgggccaggtgtggttgggatccatggagactcaccctattacttcctgacttcagcctttctgacagcagccattatcctgctccataccttttggggagttgtgttctttgatgcctgtgagaggagacggtactgggctttgggcctggtggttgggagtcacctactgacatcgggactgacattcctgaacccctggtatgaggccagcctgctgcccatctatgcagtcactgtttccatggggctctgggccttcatcacagctggagggtccctccgaagtattcagcgcagcctcttgtgtaaggactgactacctggactgatcgcctgacagatcccacctgcctgtccactgcccatgactgagcccagccccagcccgggtccattgcccacattctctgtctccttctcgtcggtctaccccactacctccagggttttgctttgtccttttgtgaccgttagtctctaagctttaccaggagcagcctgggttcagccagtcagtgactggtgggtttgaatctgcacttatccccaccacctggggacccccttgttgtgtccaggactccccctgtgtcagtgctctgctctcaccctgcccaagactcacctcccttcccctctgcaggccgacggcaggaggacagtcgggtgatggtgtattctgccctgcgcatcccacccgaggactgagggaacctaggggggacccctgggcctggggtgccctcctgatgtcctcgccctgtatttctccatctccagttctggacagtgcaggttgccaagaaaagggacctagtttagccattgccctggagatgaaattaatggaggctcaaggatagatgagctctgagtttctcagtactccctcaagactggacatcttggtctttttctcaggcctgagggggaaccatttttggtgtgataaataccctaaactgcctttttttcttttttgaggtggggggagggaggaggtatattggaactcttctaacctccttgggctatattttctctcctcgagttgctcctcatggctgggctcatttcggtccctttctccttggtcccagaccttgggggaaaggaaggaagtgcatgtttgggaactggcattactggaactaatggttttaacctccttaaccaccagcatccctcctctccccaaggtgaagtggagggtgctgtggtgagctggccactccagagctgcagtgccactggaggagtcagactaccatgacatcgtagggaaggaggggagatttttttgtagtttttaattggggtgtgggaggggcggggaggttttctataaactgtatcattttctgctgagggtggagtgtcccatccttttaatcaaggtgattgtgattttgactaataaaaaagaatttgtaaaaaaaaaaaaaaa

SEQ ID NO: 117 - DNA, 1780 bp, Homo sapiens
aggaagtggcgcggaccttcatttggggtttcggttcccccccttccccttccccggggtctgggggtgacattgcaccgcgcccctcgtggggtcgcgttgccaccccacgcggactccccagctggcgcgcccctcccatttgcctgtcctggtcaggcccccaccccccttcccacctgaccagccatgggggctgcggtgtttttcggctgcactttcgtcgcgttcggcccggccttcgcgcttttcttgatcactgtggctggggacccgcttcgcgttatcatcctggtcgcaggggcatttttctggctggtctccctgctcctggcctctgtggtctggttcatcttggtccatgtgaccgaccggtcagatgcccggctccagtacggcctcctgatttttggtgctgctgtctctgtccttctacaggaggtgttccgctttgcctactacaagctgcttaagaaggcagatgaggggttagcatcgctgagtgaggacggaagatcacccatctccatccgccagatggcctatgtttctggtctctccttcggtatcatcagtggtgtcttctctgttatcaatattttggctgatgcacttgggccaggtgtggttgggatccatggagactcaccctattacttcctgacttcagcctttctgacagcagccattatcctgctccataccttttggggagttgtgttctttgatgcctgtgagaggagacggtactgggctttgggcctggtggttgggagtcacctactgacatcgggactgacattcctgaacccctggtatgaggccagcctgctgcccatctatgcagtcactgtttccatggggctctgggccttcatcacagctggagggtccctccgaagtattcagcgcagcctcttgtgccgacggcaggaggacagtcgggtgatggtgtattctgccctgcgcatcccacccgaggactgagggaacctaggggggacccctgggcctggggtgccctcctgatgtcctcgccctgtatttctccatctccagttctggacagtgcaggttgccaagaaaagggacctagtttagccattgccctggagatgaaattaatggaggctcaaggatagatgagctctgagtttctcagtactccctcaagactggacatcttggtctttttctcaggcctgagggggaaccatttttggtgtgataaataccctaaactgcctttttttcttttttgaggtggggggagggaggaggtatattggaactcttctaacctccttgggctatattttctctcctcgagttgctcctcatggctgggctcatttcggtccctttctccttggtcccagaccttgggggaaaggaaggaagtgcatgtttgggaactggcattactggaactaatggttttaacctccttaaccaccagcatccctcctctccccaaggtgaagtggagggtgctgtggtgagctggccactccagagctgcagtgccactggaggagtcagactaccatgacatcgtagggaaggaggggagatttttttgtagtttttaattggggtgtgggaggggcggggaggttttctataaactgtatcattttctgctgagggtggagtgtcccatccttttaatcaaggtgattgtgattttgactaataaaaaagaatttgtaaaaaaaaaaaaaaaaaaaaaaaaaaaaaaaaaaaaaaaaaaaaaaaaaaaaaaaaaaaaaaaaaaaaa

SEQ ID NO: 118 - DNA, 2067 bp, Homo sapiens
tctcttcggcttccgtagaggaagtggcgcggaccttcatttggggtttcggttcccccccttccccttccccggggtctgggggtgacattgcaccgcgcccctcgtggggtcgcgttgccaccccacgcggactccccagctggcgcgcccctcccatttgcctgtcctggtcaggcccccacccaccttcccacctgaccagccatgggggctgcggtgttttgcggctgcactttcgtcgcgttcggcccggccttcgcgcttttcttgatcactgtggctggggacccgcttcgcgttatcatcctggtcgcaggggcatttttctggctggtctccctgctcctggcctctgtggtctggttcatcttggtccatgtgaccgaccggtcagatgcccggctccagtacggcctcctgatttttggtgctgctgtctctgtccttctacaggaggtgttccgctttgcctactacaagctgcttaagaaggcagatgaggggttagcatcgctgagtgaggacggaagatcacccatctccatccgccagatggcctatgtttctggtctctccttcggtatcatcagtggtgtcttctctgttatcagtattttggctgatgcacttgggccaggtgtggttgggatccatggagactcaccctattacttcctgacttcagcctttctgacagcagccattatcctgctccataccttttggggagttgtgttctttgatgcctgtgagaggagacggtactgggctttgggcctggtggttgggagtcacctactgacatcgggactgacattcctgaacccctggtatgaggccagcctgctgcccatctatgcagtcactgtttccatggggctctgggccttcatcacagctggagggtccctccgaagtattcagcgcagcctcttgtgtaaggactgactacctggactgatcgcctgacagatcccacctgcctgtccactgcccatgactgagcccagccccagcccgggtccattgccctcattctctgtctccttctcgtcggtctaccccgctacctccagggttttgctttgtccttttgtgaccgttagtctctaagctttaccaggagcagcctgggttcagccagtcagtgactggtgggtttgaatctgcacttatccccaccacctggggacccccttgttgtgtccaggactccccctgtgtcagtgctctgctctcaccctgcccaagactcacctcccttcccctctgcaggccgacggcaggaggacagtcgggtgatggtgtattctgccctgcgcatcccacccgaggactgagggaacctaggggggacccctgggcctggggtgccctcctgatgtcctcgccctgtatttctccatctccagttctggacagtgcaggttgccaagaaaagggacctagtttagccattgccctggagatgaaattaatggaggctcaaggatagatgagctctgagtttctcagtactccctcaagactggacatcttggtctttttctcaggcctgagggggaaccatttttggtgtgataaataccctaaactgcctttttttcttttttgaggtggggggagggaggaggtatattggaactcttctaacctccttgggctatattttctctcctcgagttgctcctcatggctgggctcatttcggtccctttctccttggtcccagaccttgggggaaaggaaggaagtgcatgtttgggaactggcattactggaactaatggttttaacctccttaaccaccagcatccctcctctccccaaggtgaagtggagggtgctgtggtgagctggccactccagagctgcagtgccactggaggagtcagactaccatgacatcgtagggaaggaggggagatttttttgtagtttttaattgggatgtgggaggggcggggaggttttctataaactgtatcattttctgctgagggtggagtgtcccatccttttaatcaaggtgattgtgattttgactaataaaaaagaatttgt

SEQ ID NO: 119 - DNA, 1978 bp, Homo sapiens
attgcaccgcgcccctcgtggggtcgcgttgccaccccacgcggactccccagctggcgcgcccctcccatttgcctgtcctggtcaggcccccaccccccttcccacctgaccagccatgggggctgcggtgtttttcggctgcactttcgtcgcgttcggcccggccttcgcgcttttcttgatcactgtggctggggacccgcttcgcgttatcatcctggtcgcaggggcatttttctggctggtctccctgctcctggcctctgtggtctggttcatcttggtccatgtgaccgaccggtcagatgcccggctccagtacggcctcctgatttttggtgctgctgtctctgtccttctacaggaggtgttccgctttgcctactacaagctgcttaagaaggcagatgaggggttagcatcgctgagtgaggacggaagatcacccatctccatccgccagatggcctatgtttctggtctctccttcggtatcatcagtggtgtcttctctgttatcaatattttggctgatgcacttgggccaggtgtggttgggatccatggagactcaccctattacttcctgacttcagcctttctgacagcagccattatcctgctccataccttttggggagttgtgttctttgatgcctgtgagaggagacggtactgggctttgggcctggtggttgggagtcacctactgacatcgggactgacattcctgaacccctggtatgaggccagcctgctgcccatctatgcagtcactgtttccatggggctctgggccttcatcacagctggagggtccctccgaagtattcagcgcagcctcttgtgtaaggactgactacctggactgatcgcctgacagatcccacctgcctgtccactgcccatgactgagcccagccccagcccgggtccattgcccacattctctgtctccttctcgtcggtctaccccactacctccagggttttgctttgtccttttgtgaccgttagtctctaagctttaccaggagcagcctgggttcagccagtcagtgactggtgggtttgaatctgcacttatccccaccacctggggacccccttgttgtgtccaggactccccctgtgtcagtgctctgctctcaccctgcccaagactcacctcccttcccctctgcaggccgacggcaggaggacagtcgggtgatggtgtattctgccctgcgcatcccacccgaggactgagggaacctaggggggacccctgggcctggggtgccctcctgatgtcctcgccctgtatttctccatctccagttctggacagtgcaggttgccaagaaaagggacctagtttagccattgccctggagatgaaattaatggaggctcaaggatagatgagctctgagtttctcagtactccctcaagactggacatcttggtctttttctcaggcctgagggggaaccatttttggtgtgataaataccctaaactgcctttttttcttttttgaggtggggggagggaggaggtatattggaactcttctaacctccttgggctatattttctctcctcgagttgctcctcatggctgggctcatttcggtccctttctccttggtcccagaccttgggggaaaggaaggaagtgcatgtttgggaactggcattactggaactaatggttttaacctccttaaccaccagcatccctcctctccccaaggtgaagtggagggtgctgtggtgagctggccactccagagctgcagtgccactggaggagtcagactaccatgacatcgtagggaaggaggggagatttttttgtagtttttaattggggtgtgggaggggcggggaggttttctataaactgtatcattttctgctgagggtggagtgtcccatccttttaatcaaggtgattgtgattttgactaatagaaaagaatttgt

SEQ ID NO: 120 - DNA, 2102 bp, Homo sapiens
cccgcactctgcgcctctcctcgcctttctcgcacctgctcctgcgccaggcccggagacccccggggcggcttcccagaacctgcggagcacaactggccgaccgacccattcattgggaacccgtcttttgccagagcccacgtcccctgccacctctagctcggagcggcgtgtagcgccatggagaagagcaacgagaccaacggctaccttgacagcgctcaggcggggcctgcggccgggcccggagctccggggaccgcggcgggacgcgcacggcgttgcgcgcgcttcctgcggcgccaagcgctggtgctgctcaccgtgtccggggtgctggcgggcgcgggcctgggcgcggcgttgcgcgggctcagcctgagccgcacgcaggtcacctacctggccttccccggcgagatgctgctccgcatgctgcgcatgatcatcctgccgctggtggtctgcagcctggtgtcgggcgccgcctcgctcgatgccagctgcctcgggcgtctgggcggcatccgtgtcgcctactttggcctcaccacactgagtgcctcggcgctcgccgtggccttggcgttcatcatcaagccaggatccggtgcgcagacccttcagtccagcgacctggggctggaggactcggggcctcctcctgtccccaaagagacggtggactctttcctcgacctggccagaaacctgtttccctccaatcttgtggttgcagctttccgtacgtatgcaaccgattataaagtcgtgacccagaacagcagctctggaaatgtaacccatgaaaagatccccataggcactgagatagaagggatgaacattttaggattggtcctgtttgctctggtgttaggagtggccttaaagaaactaggctccgaaggagaagacctcatccgtttcttcaattccctcaacgaggcgacgatggtgctggtgtcctggattatgtggtacgtacctgtgggcatcatgttccttgttggaagcaagatcgtggaaatgaaagacatcatcgtgctggtgaccagcctggggaaatacatcttcgcatctatattgggccatgttattcatggaggaattgttctgccacttatttattttgttttcacacgaaaaaacccattcagattcctcctgggcctcctcgccccatttgcgacagcatttgctacctgctccagctcagcgacccttccctctatgatgaagtgcattgaagagaacaatggtgtggacaagaggatcagcaggtttattctccccatcggggccaccgtgaacatggacggagcagccatcttccagtgtgtggccgcggtgttcattgcgcaactcaacaacatagagctcaacgcaggacagattttcaccattctagtgactgccacagcgtccagtgttggagcagcaggcgtgccagctggaggggtcctcaccattgccattatcctggaggccattgggctgcctactcatgacctgcctctgatcctggctgtggactggattgtggaccggaccaccacggtggtgaatgtggaaggggatgccctgggtgcaggcattctccaccacctgaatcagaaggcaacaaagaaaggcgagcaggaacttgctgaggtgaaagtggaagccatccccaactgcaagtctgaggaggagacatcgcccctggtgacacaccagaaccccgctggccccgtggccagtgccccagaactggaatccaaggagtcggttctgtgatggggctgggctttgggcttgcctgccagcagtgatgtcccaccctgttcacccagccgccagtcatggacacagggcactgccttgccaacttttaccctcccaagcaatgctttggcccagtcgctggcctgaggcttacctctcggcactggcattgggctccccagccggaactggttaccaaggacaaggacactctgacattcggcttgatccatgtccaggtgcaactgtgtgtacaccagggatctgtttggaaacaaccccttgagctgccaggctcaagaaatcatggactcacagggtcctgtgtggtt

SEQ ID NO: 121 - DNA, 4562 bp, Homo sapiens
cccgcactctgcgcctctcctcgcctttctcgcacctgctcctgcgccaggccgcgagacccccggggcggcttcccagaacctgcggagcacaactggccgaccgacccattcattgggaaccccgtcttttgccagagcccacgtcccctgccacctctagctcggagcggcgtgtagcgccatggagaagagcaacgagaccaacggctaccttgacagcgctcaggcggggcctgcggccgggcccggagctccggggaccgcggcgggacgcgcacggcgttgcgcgggcttcctgcggcgccaagcgctggtgctgctcaccgtgtccggggtgctggcgggcgcgggcctgggcgcggcgttgcgcgggctcagcctgagccgcacgcaggtcacctacctggccttccccggcgagatgctgctccgcatgctgcgcatgatcatcctgccgctggtggtctgcagcctggtgtcgggcgccgcctccctcgatgccagctgcctcgggcgtctgggcggcatcgctgtcgcctactttggcctcaccacactgagtgcctcggcgctcgccgtggccttggcgttcatcatcaagccaggatccggtgcgcagacccttcagtccagcgacctggggctggaggactcggggcctcctcctgtccccaaagagacggtggactctttcctcgacctggccagaaacctgtttccctccaatcttgtggttgcagctttccgtacgtatgcaaccgattataaagtcgtgacccagaacagcagctctggaaatgtaacccatgaaaagatccccataggcactgagatagaagggatgaacattttaggattggtcctgtttgctctggtgttaggagtggccttaaagaaactaggctccgaaggagaagacctcatccgtttcttcaattccctcaacgaggcgacgatggtgctggtgtcctggattatgtggtacgtacctgtgggcatcatgttccttgttggaagcaagatcgtggaaatgaaagacatcatcgtgctggtgaccagcctggggaaatacatcttcgcatctatattgggccatgttattcatggaggaattgttctgccacttatttattttgttttcacacgaaaaaacccattcagattcctcctgggcctcctcgccccatttgcgacagcatttgctacctgctccagctcagcgacccttccctctatgatgaagtgcattgaagagaacaatggtgtggacaagaggatcagcaggtttattctccccatcggggccaccgtgaacatggacggagcagccatcttccagtgtgtggccgcggtgttcattgcgcaactcaacaacgtagagctcaacgcaggacagattttcaccattctagtgactgccacagcgtccagtgttggagcagcaggcgtgccagctggaggggtcctcaccattgccattatcctggaggccattgggctgcctactcatgacctgcctctgatcctggctgtggactggattgtggaccggaccaccacggtggtgaatgtggaaggggatgccctgggtgcaggcattctccaccacctgaatcagaaggcaacaaagaaaggcgagcaggaacttgctgaggtgaaagtggaagccatccccaactgcaagtctgaggaggagacatcgcccctggtgacacaccagaaccccgctggccccgtggccagtgccccagaactggaatccaaggagtcggttctgtgatggggctgggctttgggcttgcctgccagcagtgatgtcccaccctgttcacccagccgccagtcatggacacagggcactgcccttgccaacttttaccctcccaagcaatgctttggcccagtcgctggcctgaggcttacctctcggcactggcattgggctccccagccggaactggttaccaaggacaaggacactctgacattcggcttgatccatgtccaggtgcaactgtgtgtacaccagggatctgtttggaaacaaccccttgagctgccaggctcaagaaatcatggactcacagggtcctgtgtggttacatcttggaaaaaatgcagatgtatttcactctccccggtcagctctgcatcaggtgttttctgagcaaaccaagggggtttatagtcatctgtcgcattgcctcgagttgcagtaattgaaaaaatgctcaaattcttagccatggctggcctttgctgagctgggactcaggtgtttaaagagtttgtgctatagctaggtgtggatagcttctgatccctgggttctgggagactgcaggtgccgcacattgtcaagttagaaatactccaggtgggtgttagcactgtggtggtctctggtccacagccttaggtaaacaacttagattctgaggtcaaagaaaaaaggagagggaatgcagccttgtgggggagaagcggggcagagggttctctaatctaatcaggacaggacaggtttcacatacaattgtcccagttcgcatcccagccctggggcacttttctgcttccttccagaggcctgggcctctgataacactttggctttttctccattcacgctgatttggcaaaaggccagagatgggcctccttccctggggaggtgtgatgtagttatcacattcaggacccttgttgatttatcatctattatttgaattcaactggacactctgtaaaatgctgcactgcagcaaaaacaaaaccaccaccaccccagagaaaaccatgtactaattggagtggggtacccccattcacaggttcccaggtcccctggctttggctgatttcaaaatatagagccctttcttgccagtacatccaagtttaaaattatcagcgaaatggtccatgtttttccaattacctgctgacacggttctaagctaagtgaaggggaagatctgagagcgtgctgtttgtggctgttgatgcatattcgtgatgtaacaggtcctggggcctcactttaccccatttgtaaaatggggctaatgtcacctgcctcttacctacctcagagggatttggtgaagcaaactgttaatcttcgaaaacgaccatttcacttcttggatatcaagtgctaacccagtatgttcttcttttttatgtaagggacagctttggagaaaggactgctctgtggagcagagtcctttctgctggtgaggacagcatttctgagcagggctttgttctctatgtgcattaggacttttatcatgcccttgttctgtgtgtagttacttgacagcatcaaatgccgcctcttcctaatgtccttcaagttttcatgaactagcaaccccaccttccaccatggttctgggcgcctgattttgctgtgactcccagacccagccactgtttctgccaccctgtaacaggccattaaagctccccagtgttcagcctccttcactcccttgttttccctgttgctatgtgtcacctgggccctacagacaggggcacacgcttatggatgtgtgtaccattgagatgagaatgggtagatggaacggagaccatcaagccacacccccttcttaaaactggggacatgagcctgagcagaaagggtgaagaagagccatgggacacagagttgacccagccagggggaaagcccagctctctttaaaccagctaagccattccagtctcctgtgaagccaaaagggaccaggaaccgtgcaaaggaaactggaaacttttccccgctgggtagagcatgttgctgatactcttctgttttcaagggaaacaatcacattgtttgattccaaatggtaaatgaacactcactattcttcaggcttcagtaaatctttttttcttccttcatatatatatacacaacacacacacacatatgtatatctatacacacatgtgtgttgtgtatatgcatgtgtgtgtgtgtgcgtgtgtgtatagttttagctccaagccaagcaagtttgtgtttggatagaggggaacttaactattaactacaagttgtatgtctgtggtatcttgattttcccatttctaaagatgaatttcacaaagccataaagcgtgaaattagagctggacttaagactcattggccgaccatcctgtgtcctggcctggccctgcagtaagaagcgtgtctgggtctggagaagggtgcttccgagagtgtgcaggtggcccttccccttggaggcgagaagagagaatgtgctgtctatcttcctggttttcagtccacagagtcggtagaccaggggttacgtgactggggaaaatctcacatctccttgtctgaaaacatttcccctgctgttctctttctaacatgttgtggtaaatctgttcagatactgctcatctgactgttttgtacatgtgacaattgccttaaaacctagcacagtcctcagaaatgaataccgtgtttccactggaaaaaaaaaaaaaaaaaaaaaaaaaaaaaaaaaaaaaaaaaa

SEQ ID NO: 122 - DNA, 1697 bp, Homo sapiens
ctcggagcggcgtgtagcgccatggagaagagcaacgagaccaacggctaccttgacagcgctcaggcggggcctgcggccgggcccggagctccggggaccgcggcgggacgcgcacggcgttgcgcgggcttcctgcggcgccaagcgctggtgctgctcaccgtgtccggggtgctggcgggcgcgggcctgggcgcggcgttgcgcgggctcagcctgagccgcacgcaggtcacctacctggccttccccggcgagatgctgctccgcatgctgcgcatgatcatcctgccgctggtggtctgcagcctggtgtcgggcgccgcctcgctcgatgccagctgcctcgggcgtctgggcggcatcgctgtcgcctactttggcctcaccacactgagtgcctcggcgctcgccgtggccttggcgttcatcatcaagccaggatccggtgcgcagacccttcagtccagcgacctggggctggaggactcggggccttctcctgtccccaaagagacggtggactctttcctcgacctggccagaaacctgtttccctccaatcttggggttgcagctttccgtacgtatgcaaccgattataaagtcgtgacccagaacagcagctctggaaatgtaacccatgaaaagatccccataggcactgagatagaagggatgaacattttaggattggtcctgtttgctctggtgttaggagtggccttaaagaaactaggctccgaaggagaagacctcatccgtttcttcaattccctcaacgaggcgacgatggtgctggtgtcctggattatgtggtacgtacctgtgggcatcatgttccttgttggaagcaagatcgtggaaatgaaagacatcatcgtgctggtgaccagcctggggaaatacatcttcgcatctatattgggccatgttattcatggaggaattgttctgccacttatttattttgttttcacacgaaaaaacccattcagattcctcctgggcctcctcgccccatttgcgacagcatttgctacctgctccagctcagcgacccttccctctatgatgaagtgcattgaagagaacaatggtgtggacaagaggatcagcaggtttattctccccatcggggccaccgtgaacatggacggagcagccatcttccagtgtgtggccgcggtgttcattgcgcaactcaacaacgtagagctcaacgcaggacagattttcaccattctagtgactgccacagcgtccagtgttggagcagcaggcgtgccagctggaggggtcctcaccattgccattatcctggaggccattgggctgcctactcatgacctgcctctgatcctggctgtggactggattgtggaccggaccaccacggtggtgaatgtggaaggggatgccctgggtgcaggcattctccaccacctgaatcagaaggcaacaaagaaaggcgagcaggaacttgctgaggtgaaagtggaagccatccccaactgcaagtctgaggaggagacatcgcccctggtgacacaccagaaccccgctggccccgtggccagtgccccagaactggaatccaaggagtcggttctgtgatggggctgggctttgggcttgcctgccagcagtgatgtcccaccctgttcacccagccgccagtcatggacacaggg

SEQ ID NO: 123 - DNA, 4562 bp, Homo sapiens; identical to SEQ ID NO: 121

SEQ ID NO: 124 - DNA, 876 bp, Homo sapiens
ggcacgaggctgatttggcaaaaggccagagatgggcctccttccctggggaggtgtgatgtagttatcacattcaggacccttgttgatttatcatctattatttgaattcaactggacactctgtaaaatgctgcactgcagcaaaaacaaaaccaccaccaccccagagaaaaccatgtactaattggagtggggtacccccattcacaggttcccaggtcccctggctttggctgatttcaaaatatagagccctttcttgccagtacatccaagtttaaaattatcagcgaaatggtccatgtttttccaattacctgctgacacggttctaagctaagtgaaggggaagatctgagagcgtgctgtttgtggctgttgatgcatattcgtgatgtaacaggtcctggggcctcactttaccccatttgtaaaatggggctaatgtcacctgcctcttacctacctcagagggatttggtgaagcaaactgttaatcttcgaaaacgaccatttcacttcttggatatcaagtgctaacccagtatgttcttcttttttatgtaagggacagctttctccacagagtcctttctgctggtgaggacagcatttctgagcagggctttgttctctatgtgcattaggacttttatcatgcccttgttctgtgtgtagttacttgacagcatcaaatgccgcctcttcctaatgtccttcaagttttcatgaactagcaaccccaccttccaccatggttctgggcgcctgattttgctgtgactcccagacccagccactgtttctgccaccctgtaacaggccattaaagctccccagtgttcagcctccttcaaaaaaaaaaaaaaaaaa

SEQ ID NO: 125 - DNA, 1761 bp, Homo sapiens
cccgcctttctcgcaccggctcctgcgccaggcccggagacccccggggcggcttcccagaacctgcggacgcaactggccgacgacccattcattgggaaccccgtcttttgccagagcccacgtcccctgccacctctagctcggagcggcgtgtagcgcatggagaagagcaacgagaccaacggctaccttgacagcgctcaggcggggcctgcggccgggcccggagctccggggaccgcggcgggacgcgcacggcgttgcgcgggcttcctgcggcgccaagcgctggtgctgctcaccgtgtccggggtgctggcgggcgcgggcctgggcgcggcgttgcgcgggctcagcctgagccgcacgcaggtcacctacctggccttccccggcgagatgctgctccgcatgctgcgcatgatcatcctgccgctggtggtctgcagcctggtgtcgggcgccgcctcgctcgatgccagctgcctcgggcgtctgggcggcatcgctgtcgcctactttggcctcaccacactgactgcctcggcgctcgccgtggccttggcgttcatcatcaagccaggatccggtgcgcagacccttcagtccagcgacctggggctggaggactcggggcctcctcctgtccccaaagagacggtggactctttcctcgacctggccagaaacctgtttccctccaatcttgtggttgcagctttccgtacgtatgcaaccgattataaagtcgtgacccagaacagcagctctggaaatgtaacccatgaaaagatccccataggcactgagatagaagggatgaacattttaggattggtcctgtttgctctggtgttaggagtggccttaaagaaactaggctccgaaggagaagacctcatccgtttcttcaattccctcaacgaggcgacgatggtgctggtgtcctggattatgtggtacgtacctgtgggcatcatgttccttgttggaagcaagatcgtggaaatgaaagacatcatcgtgctggtgaccagcctggggaaatacatcttcgcatctatattgggccatgttattcatggaggaattgttctgccacttatttattttgttttcacacgaaaaaacccattcagattcctcctgggcctcctcgccccatttgcgacagcatttgctacctgctccagctcagcgacccttccctctatgatgaagtgcattgaagagaacaatggtgtggacaagaggatcagcaggtttattctccccatcggggccaccgtgaacatggacggagcagccatcttccagtgtgtggccgcggtgttcattgcgcaactcaacaacgtagagctcaacgcaggacagattttcaccattctagtgactgccacagcgtccagtgttggagcagcaggcgtgccagctggaggggtcctcaccattgccattatcctggaggccattgggctgcctactcatgacctgcctctgatcctggctgtggactggattgtggaccggaccaccacggtggtgaatgtggaaggggatgccctgggtgcaggcattctccaccacctgaatcagaaggcaacaaagaaaggcgagcaggaacttgctgaggtgaaagtggaagccatccccaactgcaagtctgaggaggagacatcgcccctggtgacacaccagaaccccgctggccccgtggccagtgccccagaactggaatccaaggagtcggttctgtga

SEQ ID NO: 126 - DNA, 3747 bp, Homo sapiens
  misc_feature (91)..(92): "n" = "a", "g", "c", or "t"
gaattccgggggccccggccggggcggggggcgcgggccacaggcccctgctccggccgccgcttgcagaccgcgggcgccgatgtcgccnngccccgctaggctgagcctcgggtcgggcgaggagccgccgcagccgccgccgcccgagccgcgggcaggagcctcgggagccgccgccgccgccgccgcccggccgggccccgccgccgcccgcgcgcccccgggcccccgacacacatgagattcttcaggctcactttcaagtgcttcgtggactgcttctgactgcgccgcccgcgccccgcaccccgccgcccgcccgccgccccgtcccccggcccggccgccccccggcccccggccggcccgcgccctcggggccctccccggtgccgccggtgccccccgcctgaccgccgccccccgtgaggcgccgcgaccccggcccggccgtgcggcccgccggggccatggcgaagaagagcgccgagaacggcatctatagcgtgtccggcgacgagaagaagggccccctcatcgcgcccgggcccgacggggccccggccaagggcgacggccccgtgggcctggggacacccggcggccgcctggccgtgccgccgcgcgagacctggacgcgccagatggacttcatcatgtcgtgcgtgggcttcgccgtgggcttgggcaacgtgtggcgcttcccctacctgtgctacaagaacggcggaggtgtgttccttattccctacgtcctgatcgccctggttggaggaatccccattttcttcttagagatctcgctgggccagttcatgaaggccggcagcatcaatgtctggaacatctgtcccctgttcaaaggcctgggctacgcctccatggtgatcgtcttctactgcaacacctactacatcatggtgctggcctggggcttctattacctggtcaagtcctttaccaccacgctgccctgggccacatgtggccacacctggaacactcccgactgcgtggagatcttccgccatgaagactgtgccaatgccagcctggccaacctcacctgtgaccagcttgctgaccgccggtcccctgtcatcgagttctgggagaacaaagtcttgaggctgtctgggggactggaggtgccaggggccctcaactgggaggtgaccctttgtctgctggcctgctgggtgctggtctacttctgtgtctggaagggggtcaaatccacgggaaagatcgtgtacttcactgctacattcccctacgtggtcctggtcgtgctgctggtgcgtggagtgctgctgcctggccccctggatggcatcatttactatctcaagcctgactggtcaaagctggggtcccctcaggtgtggatagatgcggggacccagattttcttttcttacgccattggcctgggggccctcacagccctgggcagctacaaccgcttcaacaacaactgctacaaggacgccatcatcctggctctcatcaacagtgggaccagcttctttgctggcttcgtggtcttctccatcctgggcttcatggctgcagagcagggcgtgcacatctccaaggtggcagagtcagggccgggcctggccttcatcgcctacccgcgggctgtcacgctgatgccagtggccccactctgggctgccctgttcttcttcatgctgttgctgcttggtctcgacagccagtttgtaggtgtggagggcttcatcaccggcctcctcgacctcctcccggcctcctactacttccgtttccaaagggagatctctgtggccctctgttgtgccctctgctttgtcatcgatctctccatggtgactgatggcgggatgtacgtcttccagctgtttgactactactcggccagcggcaccaccctgctctggcaggccttttgggagtgcgtggtggtggcctgggtgtacggagctgaccgcttcatggacgacattgcctgtatgatcgggtaccgaccttgcccctggatgaaatggtgctggtccttcttcaccccgctggtctgcatgggcatcttcatcttcaacgttgtgtactacgagccgctggtctacaacaacacctacgtgtacccgtggtggggtgaggccatgggctgggccttcgccctgtcctccatgctgtgcgtgccgctgcacctcctgggctgcctcctcagggccaagggcaccatggctgagcgctggcagcacctgacccagcccatctggggcctccaccacttggagtaccgagctcaggacgcagatgtcaggggcctgaccaccctgaccccagtgtccgagagcagcaaggtcgtcgtggtggagagtgtcatgtgacaactcagctcacatcaccagctcacctctggtagccatagcagcccctgcttcagccccaccgcacccctccagggggcctgcctttccctgacacttttggggtctgcctgggggaggaggggagaaagcaccatgagtgctcactaaaacaactttttccatttttaataaaacgccaaaaatatcacaacccaccaaaaatagatgcctctccccctccagccctagccgagctggtcctaggccccgctagtgccccacccccacccacagtgctgcactcctcctgcccctgccacgcccaccccctgcccacctctccaggctctgctctgcagcacacccgtggtgacccctcaccccagaagcagcagtggcagcttgggaaatgtgaggaagggaaggagggagagacgggagggaggagagagaggagaagggaggcaggggaggggcagcagaaccaaggcaaatatttcagctgggctatacccctctccccatccctgttatagaagcttagagagccagccagcaatggaaccttctggttcctgcgccaatcgccaccagtatcaattgtgtgagcttgggtgcgagtgcacgcgtgcgtgagtacggagagtatatatagatctctatctcttagcaaaggtgaatgccagatgtaaatggcgcctctgggcaaaggaggcttgtattttgcacattttataaaaacttgagagaatgagatttctgcttgtatatttctaaaaagaggaaggagcccaaaccatcctctccttaccactcccatccctgtgagccctaccttacccctctgcccctagccaaggagtgtgaatttatagatctaactttcataggcaaaacaaaagcttcgagctgttgcgtgtgtgagtctgttgtgtggatgtgcgtgtgtggtccccagccccagactggattggaaaagtgcatggtggggcctcgggctgtccccacgctgtccctttgccacaagtctgtggggcaagaggctgcaatattccgtcctgggtgtctgggctgctaacctggcctgctcaggcttcccaccctgtgcgggcacacccccaggaagggaccctggacacggctcccacgtccaggcttaaggtggatgcacttcccgcacctccagtcttctgtgtagcagctttaacccacgtttgtctgtcacgtccagtcccgagacggctgagtgaccccaagaaaggcttccccgacacccagacagaggctgcagggctggggctgggtgagggtggcgggcctgcggggacattctactgtgctaaaaagccactgcagacatagcaataaaaacatgtcattttcc

SEQ ID NO: 127 - DNA, 3917 bp, Homo sapiens
tagtcggagcgaggtggcgagtcgctgagcccgccgcggccccgagagcggctgcagccgccgccgccgggaaggagagggcgaggcgcgcccgagccgccgccgccgccgccaccgccgccgccgccaccaccgccaccggagtcgcgggccagccgggcagcctccgcgggccccggccggggcggggggcgcgggccacaggcccctgctccggccgtcgtttgcagaccgcgggcgccgatgtcgcccgcgccccgttaggatgagtctcgggtcgggcgaggagccgccgcagccgccgccgcccgagccgcgggcaggagcctcgggagccgccgccgccgccgccgccgcccggccgggccccgacgccgcccgcgcgcccccgggcccccgacacacatgagattcttcaggctcactttcaagtgcttcgtggactgcttctgactgcgccgcccgcgccccgcaccccgccgtccgcccgccgccccgtcccccggcccggccgccccccggcccccggccggcccgcgccctcggggccctccccggtgccgccggtgccccccgcctgaccgccgccccccgtgaggcgccgcgaccccggcccggccgtgcggcccgccggggccatggcgaagaagagcgccgagaacggcatctatagcgtgtccggcgacgagaagaagggccccctcatcgcgcccgggcccgacggggccccggccaagggcgacggccccgtgggcctggggacacccggcggccgcctggccgtgccgccgcgcgagacctggacgcgccagatggacttcatcatgtcgtgcgtgggcttcgccgtgggcttgggcaacgtgtggcgcttcccctacctgtgctacaagaacggcggaggtgtgttccttattccctacgtcctgatcgccctggttggaggaatccccattttcttcttagagatctcgctgggccagttcatgaaggccggcagcatcaatgtctggaacatctgtcccctgttcaaaggcctgggctacgcctccatggtgatcgtcttctactgcaacacctactacatcatggtgctggcctggggcttctattacctggtcaagtcctttaccaccacgctgccctgggccacatgtggccacacctggaacactcccgactgcgtggagatcttccgccatgaagactgtgccaatgccagcctggccaacctcacctgtgaccagcttgctgaccgccggtcccctgtcatcgagttctgggagaacaaagtcttgaggctgtctgggggactggaggtgccaggggccctcaactgggaggtgaccctttgtctgctggcctgctgggtgctggtctacttctgtgtctggaagggggtcaaatccacgggaaagatcgtgtacttcactgctacattcccctacgtggtcctggtcgtgctgctggtgcgtggagtgctgctgcctggcgccctggatggcatcatttactatctcaagcctgactggtcaaagctggggtcccctcaggtgtggatagatgcggggacccagattttcttttcttacgccattggcctgggggccctcacagccctgggcagctacaaccgcttcaacaacaactgctacaaggacgccatcatcctggctctcatcaacagtgggaccagcttctttgctggcttcgtggtcttctccatcctgggcttcatggctgcagagcagggcgtgcacatctccaaggtggcagagtcagggccgggcctggccttcatcgcctacccgcgggctgtcacgctgatgccagtggccccactctgggctgccctgttcttcttcatgctgttgctgcttggtctcgacagccagtttgtaggtgtggagggcttcatcaccggcctcctcgacctcctcccggcctcctactacttccgtttccaaagggagatctctgtggccctctgttgtgccctctgctttgtcatcgatctctccatggtgactgatggcgggatgtacgtcttccagctgtttgactactactcggccagcggcaccaccctgctctggcaggccttttgggagtgcgtggtggtggcctgggtgtacggagctgaccgcttcatggacgacattgcctgtatgatcgggtaccgaccttgcccctggatgaaatggtgctggtccttcttcaccccgctggtctgcatgggcatcttcatcttcaacgttgtgtactacgagccgctggtctacaacaacacctacgtgtacccgtggtggggtgaggccatgggctgggccttcgccctgtcctccatgctgtgcgtgccgctgcacctcctgggctgcctcctcagggccaagggcaccatggctgagcgctggcagcacctgacccagcccatctggggcctccaccacttggagtaccgagctcaggacgcagatgtcaggggcctgaccaccctgaccccagtgtccgagagcagcaaggtcgtcgtggtggagagtgtcatgtgacaactcagctcacatcaccagctcacctctggtagccatagcagcccctgcttcagccccaccgcacccctccagggggcctgcctttccctgacacttttggggtctgcctgggggaggaggggagaaagcaccatgagtgctcactaaaacaactttttccatttttaataaaacgccaaaaatatcacaacccaccaaaaatagatgcctctccccctccagccctagccgagctggtcctaggccccgcctagtgccccacccccacccacagtgctgcactcctcctgcccctgccacgcccaccccctgcccacctctccaggctctgctctgcagcacacccgtgggtgacccctcaccccagaagcagcagtggcagcttgggaaatgtgaggaagggaaggagggagagacgggagggaggagagagaggagaagggaggcaggggaggggcagcagaaccaaggcaaatatttcagctgggctatacccctctccccatccctgttatagaagcttagagagccagccagcaatggaaccttctggttcctgcgccaatcgccaccagtatcaattgtgtgagcttgggtgcgagtgcacgcgtgcgtgagtacggagagtatatatagatctctatctcttagcaaaggtgaatgccagatgtaaatggcgcctctgggcaaaggaggcttgtattttgcacattttataaaaacttgagagaatgagatttctgcttgtatatttctaaaaagaggaaggagcccaaaccatcctctccttaccactcccatccctgtgagccctaccttacccctctgcccctagccaaggagtgtgaatttatagatctaactttcataggcaaaacaaaagcttcgagctgttgcgtgtgtgagtctgttgtgtggatgtgcgtgtgtggtccccagccccagactggattggaaaagtgcatggtgggggcctcggggctgtccccacgctgtccctttgccacaagtctgtggggcaagaggctgcaatattccgtcctgggtgtctgggctgctaacctggcctgctcaggcttcccaccctgtgcggggcacacccccaggaagggaccctggacacggctcccacgtccaggcttaaggtggatgcacttcccgcacctccagtcttctgtgtagcagctttaacccacgtttgtctgtcacgtccagtcccgagacggctgagtgaccccaagaaaggcttccccgacacccagacagaggctgcagggctggggctgggtgagggtggcgggcctgcggggacattctactgtgctaaaaagccactgcagacatagcaataaaaacatgtcattttcc

SEQ ID NO: 128 - DNA, 2425 bp, Homo sapiens
tcagctggaattccggctgaaagcaagcaatgctccccaccctgcaaatccagggcccagcagcctttgctcctggggatagaggccctggcaggcactgtcccttccctgtgcccatcacccccactggtgccctcctgccagtctctgactcttgtgacagtctggtggacctggtctggccatctgttacctatcttgccttggggacccagagcagagtctggccacatcccttgggggctcctggtcaggctggggagtcacctgaacaaagaagacagtgtctagagctgtgggacatggccagctccctgggggacaaggtccccagagcagcatgtgggaagagggggcagacagtgtggcagctgcatctcgcctgcctctgcctggcccagttccactctccacctgctcaacccccacctctctccagaagaggagggggacccgacccggatccaatatcccgctccctgcctgggcctcccacacctgcactgcccacacactcatacagctctcactccccacgtgctccacgcctcctgtccccactgaggagagctcccagaggctcgcctgctccccaccgacacgcgtccctgcagacaaacgaggcgcccagggagcttccccactgcacttggccagggctgccggggcgcagccttgcccctagcttcctctggcgggagccatggctcggaggacaatggggacctctgaacatacctgcccgcaagggggaccggaggcgctgggagtgggggtgtgagggaggtggtgccacagcctccgctgagcagcctggcccccagatcgtgtacttcactgctacattcccctacgtggtcctggtcgtgctgctggtgcgtggagtgctgctgcctggcgccctggatggcatcatttactatctcaagcctgactggtcaaagctggggtcccctcaggtgtggatagatgcggggacccagattttcttttcttacgccattggcctgggggccctcacagccctgggcagctacaaccgcttcaacaacaactgctacaaggacgccatcatcctggctctcatcaacagtgggaccagcttctttgctggcttcgtggtcttctccatcctgggcttcatggctgcagagcagggcgtgcacatctccaaggtggcagagtcagggccgggcctggccttcatcgcctacccgcgggctgtcacgctgatgccagtggccccactctgggctgccctgttcttcttcatgctgttgctgcttggtctcgacagccaggtttgcatggggctctgggacagggagccaggaggggggcggagggagggctgcaggcaaggaaaggggtggaggaggtgcggggatcggcctgagctgccctggccacagtttgtaggtgtggagggcttcatcaccggcctcctcgacctcctcccggcctcctactacttccgtttccaaagggagatctctgtggccctctgttgtgccctctgctttgtcatcgatctctccatggtgactgatgtgagtggggtggggggtctgcctgtgacctctggtggccgtctgccatcctccctgactgggctctgtccccagggcgggatgtacgtcttccagctgtttgactactactcggccagcggcaccaccctgctctggcaggccttttgggagtgcgtggtggtggcctgggtgtacggtaggtcatggctgagggctgggctgggggatggtggcggggaaggcaggtctccagcttggccctcccgcctcacctcgccgcagggagctgaccgcttcatggacgacattgcctgtatgatcgggtaccgaccttgcccctggatgaaatggtgctggtccttcttcaccccgctggtctgcatgggcatcttcatcttcaacgttgtgtactacgagccgctggtctacaacaacacctacgtgtacccgtggtggggtgaggccatgggctgggccttcgccctgtcctccatgctgtgcgtgccgctgcacctcctgggctgcctcctcagggcaaagggcaccatggctgagcgctggcagcacctgacccagcccatctggggcctccaccacttggagtaccgagctcaggacgcagatgtcaggggcctgaccaccctgaccccagtgtccgagagcagcaaggtcgtcgtggtggagagtgtcatgtgacaactcagctcacatcaccagctcacctctggtagccatagcagcccctgcttcagccccaccgcacccctccagggggcctgcctttccctgacacttttggggtctgcctgggggaggaggggagaaagcaccatgagtgctcactaaaacaactttttccatttttaataaaacgcccggaattccgccgatac

SEQ ID NO: 129 - DNA, 2168 bp, Homo sapiens
gaggagccggccccgcagccgctgacagggctctgggctggggccatggcgaagaagagcgccgagaacggcatctatagcgtgtccggcgacgagaagaagggccccctcatcgcgcccgggcccgacggggccccggccaagggcgacggccccgtgggcctggggacacccggcggccgcctggccgtgccgccgcgcgagacctggacgcgccagatggacttcatcatgtcgtgcgtgggcttcgccgtgggcttgggcaacgtgtggcgcttcccctacctgtgctacaagaacggcggaggtgtgttccttattccctacgtcctgatcgccctggttggaggaatccccattttcttcttagagatctcgctgggccagttcatgaaggccggcagcatcaatgtctggaacatctgtcccctgttcaaaggcctgggctacgcctccatggtgatcgtcttctactgcaacacctactacatcatggtgctggcctggggcttctattacctggtcaagtcctttaccaccacgctgccctgggccacatgtggccacacctggaacactcccgactgcgtggagatcttccgccatgaagactgtgccaatgccagcctggccaacctcacctgtgaccagcttgctgaccgccggtcccctgtcatcgagttctgggagaacaaagtcttgaggctgtctgggggactggaggtgccaggggccctcaactgggaggtgaccctttgtctgctggcctgctgggtgctggtctacttctgtgtctggaagggggtcaaatccacgggaaagatcgtgtacttcactgctacattcccctacgtggtcctggtcgtgctgctggtgcgtggagtgctgctgcctggcgccctggatggcatcatttactatctcaagcctgactggtcaaagctggggtcccctcaggtgtggatagatgcggggacccagattttcttttcttacgccattggcctgggggccctcacagccctgggcagctacaaccgcttcaacaacaactgctacaaggacgccatcatcctggctctcatcaacagtgggaccagcttctttgctggcttcgtggtcttctccatcctgggcttcatggctgcagagcagggcgtgcacatctccaaggtggcagagtcagggccgggcctggccttcatcgcctacccgcgggctgtcacgctgatgccagtggccccactctgggctgccctgttcttcttcatgctgttgctgcttggtctcgacagccagtttgtaggtgtggagggcttcatcaccggcctcctcgacctcctcccggcctcctactacttccgtttccaaagggagatctctgtggccctctgttgtgccctctgctttgtcatcgatctctccatggtgactgatggcgggatgtacgtcttccagctgtttgactactactcggccagcggcaccaccctgctctggcaggccttttgggagtgcgtggtggtggcctgggtgtacggagctgaccgcttcatggacgacattgcctgtatgatcgggtaccgaccttgcccctggatgaaatggtgctggtccttcttcaccccgctggtctgcatgggcatcttcatcttcaacgttgtgtactacgagccgctggtctacaacaacacctacgtgtacccgtggtggggtgaggccatgggctgggccttcgccctgtcctccatgctgtgcgtgccgctgcacctcctgggctgcctcctcagggccaagggcaccatggctgagcgctggcagcacctgacccagcccatctggggcctccaccacttggagtaccgagctcaggacgcagatgtcaggggcctgaccaccctgaccccagtgtccgagagcagcaaggtcgtcgtggtggagagtgtcatgtgacaactcagctcacatcaccagctcacctctggtagccatagcagcccctgcttcagccccaccgcacccctccagggggcctgcctttccctgacacttttggggtctgcctgggggaggaggggagaaagcaccatgagtgctcactaaaacaactttttccatttttaataaaacgccaaaaataaaaaaaaaaaaaaaaaaaaaaaaaaaaa

SEQ ID NO: 130 - DNA, 1278 bp, Homo sapiens
gccaggcgtccctctgcctgcccactcagtggcaacacccgggagctgttttgtcctttgtggagcctcagcagttccctctttcagaactcactgccaagagccctgaacaggagccaccatgcagtgcttcagcttcattaagaccatgatgatcctcttcaatttgctcatctttctgtgtggtgcagccctgttggcagtgggcatctgggtgtcaatcgatggggcatcctttctgaagatcttcgggccactgtcgtccagtgccatgcagtttgtcaacgtgggctacttcctcatcgcagccggcgttgtggtctttgctcttggtttcctgggctgctatggtgctaagactgagagcaagtgtgccctcgtgacgttcttcttcatcctcctcctcatcttcattgctgaggttgcagctgctgtggtcgccttggtgtacaccacaatggctgagcacttcctgacgttgctggtagtgcctgccatcaagaaagattatggttcccaggaagacttcactcaagtgtggaacaccaccatgaaagggctcaagtgctgtggcttcaccaactatacggattttgaggactcaccctacttcaaagagaacagtgcctttcccccattctgttgcaatgacaacgtcaccaacacagccaatgaaacctgcaccaagcaaaaggctcacgaccaaaaagtagagggttgcttcaatcagcttttgtatgacatccgaactaatgcagtcaccgtgggtggtgtggcagctggaattgggggcctcgagctggctgccatgattgtgtccatgtatctgtactgcaatctacaataagtccacttctgcctctgccactactgctgccacatgggaactgtgaagaggcaccctggcaagcagcagtgattgggggaggggacaggatctaacaatgtcacttgggccagaatggacctgccctttctgctccagacttggggctagatagggaccactccttttaggcgatgcctgactttccttccattggtgggtggatgggtggggggcattccagagcctctaaggtagccagttctgttgcccattcccccagtctattaaacccttgatatgccccctaggcctagtggtgatcccagtgctctactgggggatgagagaaaggcattttatagcctgggcataagtgaaatcagcagagcctctgggtggatgtgtagaaggcacttcaaaatgcataaacctgttacaatgttaaaaaa

SEQ ID NO: 131 - DNA, 1297 bp, Homo sapiens
gtgagagccaggcgtccctctgcctgcccactcagtggcaacacccgggagctgttttgtcctttgtggagcctcagcagttccctctttcagaactcactgccaagagccctgaacaggagccaccatgcagtgcttcagcttcattaagaccatgatgatcctcttcaatttgctcatctttctgtgtggtgcagccctgttggcagtgggcatctgggtgtcaatcgatggggcatcctttctgaagatcttcgggccactgtcgtccagtgccatgcagtttgtcaacgtgggctacttcctcatcgcagccggcgttgtggtctttgctcttggtttcctgggctgctatggtgctaagactgagagcaagtgtgccctcgtgacgttcttcttcatcctcctcctcatcttcattgctgaggttgcagctgctgtggtcgccttggtgtacaccacaatggctgagcacttcctgacgttgctggtagtgcctgccatcaagaaagattatggttcccaggaagacttcactcaagtgtggaacaccaccatgaaagggctcaagtgctgtggcttcaccaactatacggattttgaggactcaccctacttcaaagagaacagtgcctttcccccattctgttgcaatgacaacgtcaccaacacagccaatgaaacctgcaccaagcaaaaggctcacgaccaaaaagtagagggttgcttcaatcagcttttgtatgacatccgaactaatgcagtcaccgtgggtggtgtggcagctggaattgggggcctcgagctggctgccatgattgtgtccatgtatctgtactgcaatctacaataagtccacttctgcctctgccactactgctgccacatgggaactgtgaagaggcaccctggcaagcagcagtgattgggggaggggacaggatctaacaatgtcacttgggccagaatggacctgccctttctgctccagacttggggctagatagggaccactccttttaggcgatgcctgactttccttccattggtgggtggatgggtggggggcattccagagcctctaaggtagccagttctgttgcccattcccccagtctattaaacccttgatatgccccctaggcctagtggtgatcccagtgctctactgggggatgagagaaaggcattttatagcctgggcataagtgaaatcagcagagcctctgggtggatgtgtagaaggcacttcaaaatgcataaacctgttacaatgttaaaaaaaaaaaaaaaaaaa

SEQ ID NO: 132 - DNA, 1044 bp, Homo sapiens
cacgagggcgtccctctgcctgcccactcagtggcaacacccgggagctgttttgtcctttgtggagcctcagcagttccctctttcagaactcactgccaagagccctgaacaggagccaccatgcagtgcttcagcttcattaagaccatgatgatcctcttcaatttgctcatctttctgtgtggtgcagccctgttggcagtgggcatctgggtgtcaatcgatggggcatcctttctgaagatcttcgggccactgtcgtccagtgccatgcagtttgtcaacgtgggctacttcctcatcgcagccggcgttgtggtctttgctcttggtttcctgggctgctatggtgctaagactgagagcaagtgtgccctcgtgacgttcttcttcatcctcctcctcatcttcattgctgaggttgcagctgctgtggtcgccttggtgtacaccacaatggctgagcacttcctgacgttgctggtagtgcctgccatcaagaaagattatggttcccaggaagacttcactcaagtgtggaacaccaccatgaaagggctcaagtgctgtggcttcaccaactatacggattttgaggactcaccctacttcaaagagaacagtgcctttcccccattctgttgcaatgacaacgtcaccaacacagccaatgaaacctgcaccaagcaaaaggctcacgaccaaaaagtagagggttgcttcaatcagcttttgtatgacatccgaactaatgcagtcaccgtgggtggtgtggcagctggaattgggggcctcgagctggctgccatgattgtttccatgtatctgtactgcaatctacaataagtccacttctgcctctgccactactgctgccacatgggaaactgtgaagaggcaccctgggcaagcagcagtgattgggggaggggacaggatctaacaatgtcacttgggccagaatggacctggcctttctgctcccagacttgggggctagattagggaccactccttttaggcgatgcctgactttgcctt

SEQ ID NO: 133 - DNA, 1297 bp, Homo sapiens; identical to SEQ ID NO: 131

SEQ ID NO: 134 - DNA, 1306 bp, Homo sapiens
ggcacgagggagagccaggcgtccctctgcctgcccactcagtggcaacacccgggagctgttttgtcctttgtggagcctcagcagttccctctttcagaactcactgccaagagccctgaacaggagccaccatgcagtgcttcagcttcattaagaccatgatgatcctcttcaatttgctcatctttctgtgtggtgcagccctgttggcagtgggcatctgggtgtcaatcgatggggcatcctttctgaagatcttcgggccactgtcgtccagtgccatgcagtttgtcaacgtgggctacttcctcatcgcagccggcgttgtggtctttgctcttggtttcctgggctgctatggtgctaagactgagagcaagtgtgccctcgtgacgttcttcttcatcctcctcctcatcttcattgctgaggttgcagctgctgtggtcgccttggtgtacaccacaatggctgagcacttcctgacgttgctggtagtgcctgccatcaagaaagattatggttcccaggaagacttcactcaagtgtggaacaccaccatgaaagggctcaagtgctgtggcttcaccaactatacggattttgaggactcaccctacttcaaagagaacagtgcctttcccccattctgttgcaatgacaacgtcaccaacacagccaatgaaacctgcaccaagcaaaaggctcacgaccaaaaagtagagggttgcttcaatcagcttttgtatgacatccgaactaatgcagtcaccgtgggtggtgtggcagctggaattgggggcctcgagctggctgccatgattgtgtccatgtatctgtactgcaatctacaataagtccacttctgcctctgccactactgctgccacatgggaactgtgaagaggcaccctggcaagcagcagtgattgggggaggggacaggatctaacaatgtcacttgggccagaatggacctgccctttctgctccagacttggggctagatagggaccactccttttaggcgatgcctgactttccttccattggtgggtggatgggtggggggcattccagagcctctaaggtagccagttctgttgcccattcccccagtctattaaacccttgatatgccccctaggcctagtggtgatcccagtgctctactgggggatgagagaaaggcattttatagcctgggcataagtgaaatcagcagagcctctgggtggatgtgtagaaggcacttcaaaatgcataaacctgttacaatgttaaaaaaaaaaaaaaaaaaaaa

SEQ ID NO: 135 - DNA, 1305 bp, Homo sapiens
ggcacgaggtgagagccaggcgtccctctgcctgcccactcagtggcaacacccgggagctgttttgtcctttgtggagcctcagcagttccctctttcagaactcactgccaagagccctgaacaggagccaccatgcagtgcttcagcttcattaagaccatgatgatcctcttcaatttgctcatctttctgtgtggtgcagccctgttggcagtgggcatctgggtgtcaatctatggggcatcctttctgaagatcttcgggccactgtcgtccagtgccatgcagtttgtcaacgtgggctacttcctcatcgcagccggcgttgtggtctttgctcttggtttcctgggctgctatggtgctaagactgagagcaagtgtgccctcgtgacgttcttcttcatcctcctcctcatcttcattgctgaggttgcagctgctgtggtcccttggtgtacaccacaatggctgagcacttcctgacgttgctggtagtgcctgccatcaagaaagattatggttcccaggaagacttcactcaagtgtggaacaccaccatgaaagggctcaagtgctgtggcttcaccaactatacggattttgaggactcaccctacttcaaagagaacagtgcctttcccccattctgttgcaatgacaacgtcaccaacacagccaatgaaacctgcaccaagcaaaaggctcacgaccaaaaagtagagggttgcttcaatcagcttttgtatgacatccgaactaatgcagtcaccgtgggtggtgtggcagctggaattgggggcctcgagctggctgccatgattgtgtccatgtatctgtactgcaatctacaataagtccacttctgcctctgccactactgctgccacatgggaactgtgaagaggcaccctggcaagcagcagtgattgggggaggggacaggatctaacaatgtcacttgggccagaatggacctgccctttctgctccagacttggggctagatagggaccactccttttaggcgatgcctgactttccttccattggtgggtggatgggtggggggcattccagagcctctaaggtagccagttctgttgcccattcccccagtctattaaacccttgatatgccccctaggcctagtggtgatcccagtgctctactgggggatgagagaaaggcattttatagcctgggcataagtgaaatcagcagagcctctgggtggatgtgtagaaggcacttcaaaatgcataaacctgttacaatgttaaaaaaaaaaaaaaaaaaaa

SEQ ID NO: 136 - DNA, 1076 bp, Homo sapiens
atgcagtgcttcagcttcattaagaccatgatgatcctcttcaatttgctcatctttctgtgtggtgcagccctgttggcagtgggcatctgggtgtcaatcgatggggcatcctttctgaagatcttcgggccactgtcgtccagtgccatgcagtttgtcaacgtgggctacttcctcatcgcagccggcgttgtggtctttgctcttggtttcctgggctgctatggtgctaagactgagagcaagtgtgccctcgtgacgttcttcttcatcctcctcctcatcttcattgctgaggttgcagctgctgtggtcgccttggtgtacaccacaatggctgagcacttcctgacgttgctggtagtgcctgccatcaagaaagattatggttcccaggaagacttcactcaagtgtggaacaccaccatgaaagggctcaagtgctgtggcttcaccaactatacggattttgaggactcaccctacttcaaagagaacagtgcctttcccccattctgttgcaatgacaacgtcaccaacacagccaatgaaacctgcaccgagcaaaaggctcacgaccaaaaagtagagggttgcttcaatcagcttttgtatgacatccgaactaatgcagtcaccgtgggtggtgtggcagctggaattgggggcctcgagctggctgccatgattgtgtccatgtatctgtactgcaatctacaataagtccacttctgcctctgccactactgctgccacatgggaactgtgaagaggcaccctggcaagcagcagtgattgggggaggggacaggatctaacaatgtcacttgggccagaatggacctgccctttctgctccagacttggggctagatagggaccactccttttaggcgatgctgactttccttccattggtgggtggatgggtggggggcattccagagcctctaaggtagccagttctgttgcccattcccccagtctattaaacccttgatatgccccctaggcctagtggtgatcccagtgctctactgggggatgagagaaaggcattttatagcctgggc

SEQ ID NO: 137 - DNA, 2247 bp, Homo sapiens
atggctagctctaggtgtcccgctccccgcgggtgccgctgcctccccggagcttctctcgcatggctggggacagtactgctacttctcgccgactgggtgctgctccggaccgcgctgccccgcatattctccctgctggtgcccaccgcgctgccactgctccgggtctgggcggtgggcctgagccgctgggccgtgctctggctgggggcctgcggggtcctcagggcaacggttggctccaagagcgaaaacgcaggtgcccagggctggctggctgctttgaagccattagctgcggcactgggcttggccctgccgggacttgccttgttccgagagctgatctcatggggagcccccgggtccgcggatagcaccaggctactgcactggggaagtcaccctaccgccttcgttgtcagttatgcagcggcactgcccgcagcagccctgtggcacaaactcgggagcctctgggtgcccggcggtcagggcggctctggaaaccctgtgcgtcggcttctaggctgcctgggctcggagacgcgccgcctctcgctgttcctggtcctggtggtcctctcctctcttggggagatggccattccattctttacgggccgcctcactgactggattctacaagatggctcagccgataccttcactcgaaacttaactctcatgtccattctcaccatagccagtgcagtgctggagttcgtgggtgacgggatctataacaacaccatgggccacgtgcacagccacttgcagggagaggtgtttggggctgtcctgcgccaggagacggagtttttccaacagaaccagacaggtaacatcatgtctcgggtaacagaggacacgtccaccctgagtgattctctgagtgagaatctgagcttatttctgtggtacctggtgcgaggcctatgtctcttggggatcatgctctggggatcagtgtccctcaccatggtcaccctggtcaccctgcctctgcttttccttctgcccaagaaggtgggaaaatggtaccagttgctggaagtgcaggtgcgggaatctctggcaaagtccagccaggtggccattgaggctctgtcggccatgcctacagttcgaagctttgccaacgaggagggcgaagcccagaagtttagggaaaagctgcaagaaataaagacactcaaccagaaggaggctgtggcctatgcagtcaactcctggaccactagtatttcaggtatgctgctgaaagtgggaatcctctacattggtgggcagctggtgaccagtggggctgtaagcagtgggaaccttgtcacatttgttctctaccagatgcagttcacccaggctttggaggtactgctctccatctaccccagagtacagaaggctgtgggctcctcagagaaaatatttgagtacctggaccgcacccctcgctgcccacccagtggtctgttgactcccttacacttggagggccttgtccagttccaagatgtctcctttgcctacccaaaccgcccagatgtcttagtgctacaggggctgacattcaccctacgccctggcgaggtgacggcgctggtgggacccaatgggtctgggaagagcacagtggctgccctgctgcagaatctgtaccagcccaccgggggacagctgctgttggatgggaagccccttccccaatatgagcaccgctacctgcacaggcaggtggctgcagtgggacaagagccacaggtatttggaagaagtcttcaagaaaatattgcctatggcctgacccagaagccaactatggaggaaatcacagctgctgcagtaaagtctggggcccatagtttcatctctggactccctcagggctatgacacagaggtaggcgaggctgggagccagctgtcagggggtcagcaacaggcagtggcgttggcccgagcattgatccggaaaccgtgtgtacttatcctggatgatgccaccagtgccctggatgcaaacagccagttacaggtggagcagctcctgtacgaaagccctgagcggtactcccgctcagtgcttctcatcacccagcacctcagcctggtggagcaggctgaccacatcctctttctggaaggaggcgctatccgggaggggggaacccaccagcagctcatggagaaaaaggggtgctactgggccatggtgcaggctcctgcagatgctccagaatga

SEQ ID NO: 138 - DNA, 2958 bp, Homo sapiens
ggcacgagggtgtgcgtgatggagaaaattgggcaccagggctgctcccgagattctcagatctgatttccacgcttgctaccaaaatagtctgggcaggccacttttggaagtaggcgttatctagtgagcaggcggccgctttcgatttcgctttcccctaaatggctgagcttctcgccagcgcaggatcagcctgttcctgggactttccgagagccccgccctcgttccctcccccagccgccagtaggggaggactcggcggtacccggagcttcaggccccaccggggcgcggagagtcccagacccggccgggaccgggacggcgtccgagtgccaatggctagctctaggtgtcccgctccccgcgggtgccgctgcctccccggagcttctctcgcatggctggggacagtactgctacttctcgccgactgggtgctgctccggaccgcgctgccccgcatattctccctgctggtgcccaccgcgctgccactgctccgggtctgggcggtgggcctgagccgctgggccgtgctctggctgggggcctgcggggtcctcagggcaacggttggctccaagagcgaaaacgcaggtgcccagggctggctggctgctttgaagccattagctgcggcactgggcttggccctgccgggacttgccttgttccgagagctgatctcatggggagcccccgggtccgcggatagcaccaggctactgcactggggaagtcaccctaccgccttcgttgtcagttatgcagcggcactgcccgcagcagccctgtggcacaaactcgggagcctctgggtgcccggcggtcagggcggctctggaaaccctgtgcgtcggcttctaggctgcctgggctcggagacgcgccgcctctcgctgttcctggtcctggtggtcctctcctctcttggggagatggccattccattctttacgggccgcctcactgactggattctacaagatggctcagccgataccttcactcgaaacttaactctcatgtccattctcaccatagccagtgcagtgctggagttcgtgggtgacgggatctataacaacaccatgggccacgtgcacagccacttgcagggagaggtgtttggggctgtcctgcgccaggagacggagtttttccaacagaaccagacaggtaacatcatgtctcgggtaacagaggacacgtccaccctgagtgattctctgagtgagaatctgagcttatttctgtggtacctggtgcgaggcctatgtctcttggggatcatgctctggggatcagtgtccctcaccatggtcaccctgatcaccctgcctctgcttttccttctgcccaagaaggtgggaaaatggtaccagttgctggaagtgcaggtgcgggaatctctggcaaagtccagccaggtggccattgaggctctgtcggccatgcctacagttcgaagctttgccaacgaggagggcgaagcccagaagtttagggaaaagctgcaagaaataaagacactcaaccagaaggaggctgtggcctatgcagtcaactcctggaccactagtatttcaggtatgctgctgaaagtgggaatcctctacattggtgggcagctggtgaccagtggggctgtaagcagtgggaaccttgtcacatttgttctctaccagatgcagttcacccaggctgtggaggtactgctctccatctaccccagagtacagaaggctgtgggctcctcagagaaaatatttgagtacctggaccgcacccctcgctgcccacccagtggtctgttgactcccttacacttggagggccttgtccagttccaagatgtctcctttgcctacccaaaccgcccagatgtcttagtgctacaggggctgacattcaccctacgccctggcgaggtgacggcgctggtgggacccaatgggtctgggaagagcacagtggctgccctgctgcagaatctgtaccagcccaccgggggacagctgctgttggatgggaagccccttccccaatatgagcaccgctacctgcacaggcaggtggctgcagtgggacaagagccacaggtatttggaagaagtcttcaagaaaatattgcctatggcctgacccagaagccaactatggaggaaatcacagctgctgcagtaaagtctggggcccatagtttcatctctggactccctcagggctatgacacagaggtagacgaggctgggagccagctgtcagggggtcagcgacaggcagtggcgttggcccgagcattgatccggaaaccgtgtgtacttatcctggatgatgccaccagtgccctggatgcaaacagccagttacaggtggagcagctcctgtacgaaagccctgagcggtactcccgctcagtgcttctcatcacccagcacctcagcctggtggagcaggctgaccacatcctctttctggaaggaggcgctatccgggaggggggaacccaccagcagctcatggagaaaaaggggtgctactgggccatggtgcaggctcctgcagatgctccagaatgaaagccttctcagacctgcgcactccatctccctcccttttcttctctctgtggtggagaaccacagctgcagagtagcagctgcctccaggatgagttacttgaaatttgccttgagtgtgttacctcctttccaagctcctcgtgataatgcagacttcctggagtacaaacacaggatttgtaattcctactgtaacggagtttagagccagggctgatgctttggtgtggccagcactctgaaactgagaaatgttcagaatgtacggaaagatgatcagctattttcaacataactgaaggcatatgctggcccataaacaccctgtaggttcttgatatttataataaaattggtgttttgt

SEQ ID NO: 139 - DNA, 2824 bp, Homo sapiens
gcggccgctttcgatttcgctttcccctaaatggctgagcttctcgccagcgcaggatcagcctgttcctgggactttccgagagccccgccctcgttccctcccccagccgccagtaggggaggactcggcggtacccggagcttcaggccccaccggggcgcggagagtcccagacccggccgggaccgggacggcgtccgagtgccaatggctagctctaggtgtcccgctccccgcgggtgccgctgcctccccggagcttctctcgcatggctggggacagtactgctacttctcgccgactgggtgctgctccggaccgcgctgccccgcatattctccctgctggtgcccaccgcgctgccactgctccgggtctgggcggtgggcctgagccgctgggccgtgctctggctgggggcctgcggggtcctcagggcaacggttggctccaagagcgaaaacgcaggtgcccagggctggctggctgctttgaagccattagctgcggcactgggcttggccctgccgggacttgccttgttccgagagctgatctcatggggagcccccgggtccgcggatagcaccaggctactgcactggggaagtcaccctaccgccttcgttgtcagttatgcagcggcactgcccgcagcagccctgtggcacaaactcgggagcctctgggtgcccggcggtcagggcggctctggaaaccctgtgcgtcggcttctaggctgcctgggctcggagacgcgccgcctctcgctgttcctggtcctggtggtcctctcctctcttggggagatggccattccattctttacgggccgcctcactgactggattctacaagatggctcagccgataccttcactcgaaacttaactctcatgtccattctcaccatagccagtgcagtgctggagttcgtgggtgacgggatctataacaacaccatgggccacgtgcacagccacttgcagggagaggtgtttggggctgtcctgcgccaggagacggagtttttccaacagaaccagacaggtaacatcatgtctcgggtaacagaggacacgtccaccctgagtgattctctgagtgagaatctgagcttatttctgtggtacctggtgcgaggcctatgtctcttggggatcatgctctggggatcagtgtccctcaccatggtcaccctgatcaccctgcctctgcttttccttctgcccaagaaggtgggaaaatggtaccagttgctggaagtgcaggtgcgggaatctctggcaaagtccagccaggtggccattgaggctctgtcggccatgcctacagttcgaagctttgccaacgaggagggcgaagcccagaagtttagggaaaagctgcaagaaataaagacactcaaccagaaggaggctgtggcctatgcagtcaactcctggaccactagtatttcaggtatgctgctgaaagtgggaatcctctacattggtgggcagctggtgaccagtggggctgtaagcagtgggaaccttgtcacatttgttctctaccagatgcagttcacccaggctgtggaggtactgctctccatctaccccagagtacagaaggctgtgggctcctcagagaaaatatttgagtacctggaccgcacccctcgctgcccacccagtggtctgttgactcccttacacttggagggccttgtccagttccaagatgtctcctttgcctacccaaaccgcccagatgtcttagtgctacaggggctgacattcaccctacgccctggcgaggtgacggcgctggtgggacccaatgggtctgggaagagcacagtggctgccctgctgcagaatctgtaccagcccaccgggggacagctgctgttggatgggaagccccttccccaatatgagcaccgctacctgcacaggcaggtggctgcagtgggacaagagccacaggtatttggaagaagtcttcaagaaaatattgcctatggcctgacccagaagccaactatggaggaaatcacagctgctgcagtaaagtctggggcccatagtttcatctctggactccctcagggctatgacacagaggtagacgaggctgggagccagctgtcagggggtcagcgacaggcagtggcgttggcccgagcattgatccggaaaccgtgtgtacttatcctggatgatgccaccagtgccctggatgcaaacagccagttacaggtggagcagctcctgtacgaaagccctgagcggtactcccgctcagtgcttctcatcacccagcacctcagcctggtggagcaggctgaccacatcctctttctggaaggaggcgctatccgggaggggggaacccaccagcagctcatggagaaaaaggggtgctactgggccatggtgcaggctcctgcagatgctccagaatgaaagccttctcagacctgcgcactccatctccctcccttttcttctctctgtggtggagaaccacagctgcagagtagcagctgcctccaggatgagttacttgaaatttgccttgagtgtgttacctcctttccaagctcctcgtgataatgcagacttcctggagtacaaacacaggatttgtaattcctactgtaacggagtttagagccagggctgatgctttggtgtggccagcactctgaaactgagaaatgttcagaatgtacggaaagatgatcagctattttcaacataactgaaggcatatgctggcccataaacaccctgtaggttcttgatatttataataaaattggtgttttgt

SEQ ID NO: 140 - DNA, 2983 bp, Homo sapiens
ggcacgagggtgtgcgtgatggagaaaattgggcaccagggctgctcccgagattctcagatctgatttccacgcttgctaccaaaatagtctgggcaggccacttttggaagtaggcgttatctagtgagcaggcggccgctttcgatttcgctttcccctaaatggctgagcttctcgccagcgcaggatcagcctgttcctgggactttccgagagccccgccctcgttccctcccccagccgccagtaggggaggactcggcggtacccggagcttcaggccccaccggggcgcggagagtcccaggcccggccgggaccgggacggcgtccgagtgccaatggctagctctaggtgtcccgctccccgcgggtgccgctgcctccccggagcttctctcgcatggctggggacagtactgctacttctcgccgactgggtgctgctccggaccgcgctgccccgcatattctccctgctggtgcccaccgcgctgccactgctccgggtctgggcggtgggcctgagccgctgggccgtgctctggctgggggcctgcggggtcctcagggcaacggttggctccaagagcgaaaacgcaggtgcccagggctggctggctgctttgaagccattagctgcggcactgggcttggccctgccgggacttgccttgttccgagagctgatctcatggggagcccccgggtccgcggatagcaccaggctactgcactggggaagtcaccctaccgccttcgttgtcagttatgcagcggcactgcccgcagcagccctgtggcacaaactcgggagcctctgggtgcccggcggtcagggcggctctggaaaccctgtgcgtcggcttctaggctgcctgggctcggagacgcgccgcctctcgctgttcctggtcctggtggtcctctcctctcttggggagatggccattccattctttacgggccgcctcactgactggattctacaagatggctcagccgataccttcactcgaaacttaactctcatgtccattctcaccatagccagtgcagtgctggagttcgtgggtgacgggatctataacaacaccatgggccacgtgcacagccacttgcagggagaggtgtttggggctgtcctgcgccaggagacggagtttttccaacagaaccagacaggtaacatcatgtctcgggtaacagaggacacgtccaccctgagtgattctctgagtgagaatctgagcttatttctgtggtacctggtgcgaggcctatgtctcttggggatcatgctctggggatcagtgtccctcaccatggtcaccctgatcaccctgcctctgcttttccttctgcccaagaaggtgggaaaatggtaccagttgctggaagtgcaggtgcgggaatctctggcaaagtccagccaggtggccattgaggctctgtcggccatgcctacagttcgaagctttgccaacgaggagggcgaagcccagaagtttagggaaaagctgcaagaaataaagacactcaaccagaaggaggctgtggcctatgcagtcaactcctggaccactagtatttcaggtatgctgctgaaagtgggaatcctctacattggtgggcagctggtgaccagtggggctgtaagcagtgggaaccttgtcacatttgttctctaccagatgcagttcacccaggctgtggaggtactgctctccatctaccccagagtacagaaggctgtgggctcctcagagaaaatatttgagtacctggaccgcacccctcgctgcccacccagtggtctgttgactcccttacacttggagggccttgtccagttccaagatgtctcctttgcctacccaaaccgcccagatgtcttagtgctacaggggctgacattcaccctacgccctggcgaggtgacggcgctggtgggacccaatgggtctgggaagagcacagtggctgccctgctgcagaatctgtaccagcccaccgggggacagctgctgttggatgggaagccccttccccaatatgagcaccgctacctgcacaggcaggtggctgcagtgggacaagagccacaggtatttggaagaagtcttcaagaaaatattgcctatggcctgacccagaagccaactatggaggaaatcacagctgctgcagtaaagtctggggcccatagtttcatctctggactccctcagggctatgacacagaggtagacgaggctgggagccagctgtcagggggtcagcgacaggcagtggcgttggcccgagcattgatccggaaaccgtgtgtacttatcctggatgatgccaccagtgccctggatgcaaacagccagttacaggtggagcagctcctgtacgaaagccctgagcggtactcccgctcagtgcttctcatcacccagcacctcagcctggtggagcaggctgaccacatcctctttctggaaggaggcgctatccgggaggggggaacccaccagcagctcatggagaaaaaggggtgctactgggccatggtgcaggctcctgcagatgctccagaatgaaagccttctcagacctgcgcactccatctccctcccttttcttctctctgtggtggagaaccacagctgcagagtaggcagctgcctccaggatgagttacttgaaatttgccttgagtgtgttacctcctttccaagctcctcgtgataatgcagacttcctggagtacaaacacaggatttgtaattccttactgtaacggagtttagagccagggctgatgctttggtgtggccagcactctgaaactgagaaatgttcagaatgtacggaaagatgatcagctattttcaacataactgaaggcatatgctggcccataaacaccctgtaggttcttgatatttataataaaattggtgttttgtaaaaaaaaaaaaaaaaaaaaaaa

SEQ ID NO: 141 - DNA, 2246 bp, Homo sapiens
atggctagctctaggtgtcccgctccccgcgggtgccgctgcctccccggagcttctctcgcatggctggggacagtactgctacttctcgccgactgggtgctgctccggaccgcgctgccccgcatattctccctgctggtgcccaccgcgctgccactgctccgggtctgggcggtgggcctgagccgctgggccgtgctctggctgggggcctgcggggtcctcagggcaacggttggctccaagagcgaaaacgcaggtgcccagggctggctggctgctttgaagccattagctgcggcactgggcttggccctgccgggacttgccttgttccgagagctgatctcatggggagcccccgggtccgcggatagcaccaggctactgcactggggaagtcaccctaccgccttcgttgtcagttatgcagcggcactgcccgcagcagccctgtggcacaaactcgggagcctctgggtgcccggcggtcagggcggctctggaaaccctgtgcgtcggcttctaggctgcctgggctcggagacgcgccgcctctcgctgttcctggtcctggtggtcctctcctctcttgggagatggccattccattctttacgggccgcctcactgactggattctacaagatggctcagccgataccttcactcgaaacttaactctcatgtccattctcaccatagccagtgcagtgctggagttcgtgggtgacgggatctataacaacaccatgggccacgtgcacagccacttgcagggagaggtgtttggggctgtcctgcgccaggagacggagtttttccaacagaaccagacaggtaacatcatgtctcgggtaacagaggacacgtccaccctgagtgattctctgagtgagaatctgagcttatttctgtggtacctggtgcgaggcctatgtctcttggggatcatgctctggggatcagtgtccctcaccatggtcaccctgatcaccctgcctctgcttttccttctgcccaagaaggtgggaaaatggtaccagttgctggaagtgcaggtgcgggaatctctggcaaagtccagccaggtggccattgaggctctgtcggccatgcctacagttcgaagctttgccaacgaggagggcgaagcccagaagtttagggaaaagctgcaagaaataaagacactcaaccagaaggaggctgtggcctatgcagtcaactcctggaccactagtatttcaggtatgctgctgaaagtgggaatcctctacattggtgggcagctggtgaccagtggggctgtaagcagtgggaaccttgtcacatttgttctctaccagatgcagttcacccaggctgtggaggtactgctctccatctaccccagagtacagaaggctgtgggctcctcagagaaaatatttgagtacctggaccgcacccctcgctgcccacccagtggtctgttgactcccttacacttggagggccttgtccagttccaagatgtctcctttgcctacccaaaccgcccagatgtcttagtgctacaggggctgacattcaccctacgccctggcgaggtgacggcgctggtgggacccaatgggtctgggaagagcacagtggctgccctgctgcagaatctgtaccagcccaccgggggacagctgctgttggatgggaagccccttccccaatatgagcaccgctacctgcacaggcaggtggctgcagtgggacaagagccacaggtatttggaagaagtcttcaagaaaatattgcctatggcctgacccagaagccaactatggaggaaatcacagctgctgcagtaaagtctggggcccatagtttcatctctggactccctcagggctatgacacagaggtagacgaggctgggagccagctgtcagggggtcagcgacaggcagtggcgttggcccgagcattgatccggaaaccgtgtgtacttatcctggatgatgccaccagtgccctggatgcaaacagccagttacaggtggagcagctcctgtacgaaagccctgagcggtactcccgctcagtgcttctcatcacccagcacctcagcctggtggagcaggctgaccacatcctctttctggaaggaggcgctatccgggaggggggaacccaccagcagctcatggagaaaaaggggtgctactgggccatggtgcaggctcctgcagatgctccagaatga

SEQ ID NO: 142 - DNA, 1290 bp, Homo sapiens
gggtccgcggatagcaccaggctactgcactggggaagtcaccctaccgccttcgttgtcagttatgcagcggcactgcccgcagcagccctgtggcacaaactcgggagcctctgggtgcccggcggtcagggcggctctggaaaccctgtgcgtcggcttctaggctgcctgggctcggagacgcgccgcctctcgctgttcctggtcctggtggtcctctcctctcttggggagatggccattccattctttacgggccgcctcactgactggattctacaagatggctcagccgataccttcactcgaaacttaactctcatgtccattctcaccatagccagtgcagtgctggagttcgtgggtgacgggatctataacaacaccatgggccacgtgcacagccacttgcagggagaggtgtttggggctgtcctgcgccaggagacggagtttttccaacagaaccagacaggtaacatcatgtctcgggtaacagaggacacgtccaccctgagtgattctctgagtgagaatctgagcttatttctgtggtacctggtgcgaggcctatgtctcttggggatcatgctctggggatcagtgtccctcaccatggtcaccctgatcaccctgcctctgcttttccttctgcccaagaaggtgggaaaatggtaccagttgctggaagtgcaggtgcgggaatctctggcaaagtccagccaggtggccattgaggctctgtcggccatgcctacagttcgaagctttgccaacgaggagggcgaagcccagaagtttagggaaaagctgcaagaaataaagacactcaaccagaaggaggctgtggcctatgcagtcaactcctggaccactagtatttcaggtatgctgctgaaagtgggaatcctctacattggtgggcagctggtgaccagtggggctgtaagcagtgggaaccttgtcacatttgttctctaccagatgcagttcacccaggctgtggaggtactgctctccatctaccccagagtacagaaggctgtgggctcctcagagaaaatatttgagtacctggaccgcacccctcgctgcccacccagtggtctgttgactcccttacacttggagggccttgtccagttccaagatgtctcctttgcctacccaaaccgcccagatgtcttagtgctacaggggctgacattcaccctacgccctggcgaggtgacggcgctggtgggacccaatgggtctgggaagagcacagtggctgccctgctgcag

SEQ ID NO: 143 - DNA, 2247 bp, Homo sapiens
atggctagctctaggtgtcccgctccccgcgggtgccgctgcctccccggagcttctctcgcatggctggggacagtactgctacttctcgccgactgggtgctgctccggaccgcgctgccccgcatattctccctgctggtgcccaccgcgctgccactgctccgggtctgggcggtgggcctgagccgctgggccgtgctctggctgggggcctgcggggtcctcagggcaacggttggctccaagagcgaaaacgcaggtgcccagggctggctggctgctttgaagccattagctgcggcactgggcttggccctgccgggacttgccttgttccgagagctgatctcatggggagcccccgggtccgcggatagcaccaggctactgcactggggaagtcaccctaccgccttcgttgtcagttatgcagcggcactgcccgcagcagccctgtggcacaaactcgggagcctctgggtgcccggcggtcagggcggctctggaaaccctgtgcgtcggcttctaggctgcctgggctcggagacgcgccgcctctcgctgttcctggtcctggtggtcctctcctctcttggggagatggccattccattctttacgggccgcctcactgactggattctacaagatggctcagccgataccttcactcgaaacttaactctcatgtccattctcaccatagccagtgcagtgctggagttcgtgggtgacgggatctataacaacaccatgggccacgtgcacagccacttgcagggagaggtgtttggggctgtcctgcgccaggagacggagtttttccaacagaaccagacaggtaacatcatgtctcgggtaacagaggacacgtccaccctgagtgattctctgagtgagaatctgagcttatttctgtggtacctggtgcgaggcctatgtctcttggggatcatgctctggggatcagtgtccctcaccatggtcaccctgatcaccctgcctctgcttttccttctgcccaagaaggtgggaaaatggtaccagttgctggaagtgcaggtgcgggaatctctggcaaagtccagccaggtggccattgaggctctgtcggccatgcctacagttcgaagctttgccaacgaggagggcgaagcccagaagtttagggaaaagctgcaagaaataaagacactcaaccagaaggaggctgtggcctatgcagtcaactcctggaccactagtatttcaggtatgctgctgaaagtgggaatcctctacattggtgggcagctggtgaccagtggggctgtaagcagtgggaaccttgtcacatttgttctctaccagatgcagttcacccaggctgtggaggtactgctctccatctaccccagagtacagaaggctgtgggctcctcagagaaaatatttgagtacctggaccgcacccctcgctgcccacccagtggtctgttgactcccttacacttggagggccttgtccagttccaagatgtctcctttgcctacccaaaccgcccagatgtcttagtgctacaggggctgacattcaccctacgccctggcgaggtgacggcgctggtgggacccaatgggtctgggaagagcacagtggctgccctgctgcagaatctgtaccagcccaccgggggacagctgctgttggatgggaagccccttccccaatatgagcaccgctacctgcacaggcaggtggctgcagtgggacaagagccacaggtatttggaagaagtcttcaagaaaatattgcctatggcctgacccagaagccaactatggaggaaatcacagctgctgcagtaaagtctggggcccatagtttcatctctggactccctcagggctatgacacagaggtagacgaggctgggagccagctgtcagggggtcagcgacaggcagtggcgttggcccgagcattgatccggaaaccgtgtgtacttatcctggatgatgccaccagtgccctggatgcaaacagccagttacaggtggagcagctcctgtacgaaagccctgagcggtactcccgctcagtgcttctcatcacccagcacctcagcctggtggagcaggctgaccacatcctctttctggaaggaggcgctatccgggaggggggaacccaccagcagctcatggagaaaaaggggtgctactgggccatggtgcaggctcctgcagatgctccagaatga

SEQ ID NO: 144 - DNA, 2247 bp, Homo sapiens
atggctagctctaggtgtcccgctccccgcgggtgccgctgcctccccggagcttctctcgcatggctggggacagtactgctacttctcgccgactgggtgctgctccggaccgcgctgccccgcatattctccctgctggtgcccaccgcgctgccactgctccgggtctgggcggtgggcctgagccgctgggccgtgctctggctgggggcctgcggggtcctcagggcaacggttggctccaagagcgaaaacgcaggtgcccagggctggctggctgctttgaagccattagctgcggcactgggcttggccctgccgggacttgccttgttccgagagctgatctcatggggagcccccgggtccgcggatagcaccaggctactgcactggggaagtcaccctaccgccttcgttgtcagttatgcagcggcactgcccgcagcagccctgtggcacaaactcgggagcctctgggtgcccggcggtcagggcggctctggaaaccctgtgcgtcggcttctaggctgcctgggctcggagacgcgccgcctctcgctgttcctggtcctggtggtcctctcctctcttggggagatggccattccattctttacgggccgcctcactgactggattctacaagatggctcagccgataccttcactcgaaacttaactctcatgtccattctcaccatagccagtgcagtgctggagttcgtgggtgacgggatctataacaacaccatgggccacgtgcacagccacttgcagggagaggtgtttggggctgtcctgcgccaggagacggagtttttccaacagaaccagacaggtaacatcatgtctcgggtaacagaggacacgtccaccctgagtgattctctgagtgagaatctgagcttatttctgtggtacctggtgcgaggcctatgtctcttggggatcatgctctggggatcagtgtccctcaccatggtcaccctggtcaccctgcctctgcttttccttctgcccaagaaggtgggaaaatggtaccagttgctggaagtgcaggtgcgggaatctctggcaaagtccagccaggtggccattgaggctctgtcggccatgcctacagttcgaagctttgccaacgaggagggcgaagcccagaagtttagggaaaagctgcaagaaataaagacactcaaccagaaggaggctgtggcctatgcagtcaactcctggaccactagtatttcaggtatgctgctgaaagtgggaatcctctacattggtgggcagctggtgaccagtggggctgtaagcagtgggaaccttgtcacatttgttctctaccagatgcagttcacccaggctgtggaggtactgctctccatctaccccagagtacagaaggctgtgggctcctcagagaaaatatttgagtacctggaccgcacccctcgctgcccacccagtggtctgttgactcccttacacttggagggccttgtccagttccaagatgtctcctttgcctacccaaaccgcccagatgtcttagtgctacaggggctgacattcaccctacgccctggcgaggtgacggcgctggtgggacccaatgggtctgggaagagcacagtggctgccctgctgcagaatctgtaccagcccaccgggggacagctgctgttggatgggaagccccttccccaatatgagcaccgctacctgcacaggcaggtggctgcagtgggacaagagccacaggtatttggaagaagtcttcaagaaaatattgcctatggcctgacccagaagccaactatggaggaaatcacagctgctgcagtaaagtctggggcccatagtttcatctctggactccctcagggctatgacacagaggtaggcgaggctgggagccagctgtcagggggtcagcgacaggcagtggcgttggcccgagcattgatccggaaaccatgtgtacttatcctggatgatgccaccagtgccctggatgcaaacagccagttacaggtggagcagctcctgtacgaaagccctgagcggtactcccgctcagtgcttctcatcacccagcacctcagcctggtggagcaggctgaccacatcctctttctggaaggaggcgctatccgggaggggggaacccaccagcagctcatggagaaaaaggggtgctactgggccatggtgcaggctcctgcagatgctccagaatga

SEQ ID NO: 145 - DNA, 2247 bp, Homo sapiens
atggctagctctaggtgtcccgctccccgcgggtgccgctgcctccccggagcttctctcgcatggctggggacagtactgctacttctcgccgactgggtgctgctccggaccgcgctgccccgcatattctccctgctggtgcccaccgcgctgccactgctccgggtctgggcggtgggcctgagccgctgggccgtgctctggctgggggcctgcggggtcctcagggcaacggttggctccaagagcgaaaacgcaggtgcccagggctggctggctgctttgaagccattagctgcggcactgggcttggccctgccgggacttgccttgttccgagagctgatctcatggggagcccccgggtccgcggatagcaccaggctactgcactggggaagtcaccctaccgccttcgttgtcagttatgcagcggcactgcccgcagcagccctgtggcacaaactcgggagcctctgggtgcccggcggtcagggcggctctggaaaccctgtgcgtcggcttctaggctgcctgggctcggagacgcgccgcctctcgctgttcctggtcctggtggtcctctcctctcttggggagatggccattccattctttacgggccgcctcactgactggattctacaagatggctcagccgataccttcactcgaaacttaactctcatgtccattctcaccatagccagtgcagtgctggagttcgtgggtgacgggatctataacaacaccatgggccacgtgcacagccacttgcagggagaggtgtttggggctgtcctgcgccaggagacggagtttttccaacagaaccagacaggtaacatcatgtctcgggtaacagaggacacgtccaccctgagtgattctctgagtgagaatctgagcttatttctgtggtacctggtgcgaggcctatgtctcttggggatcatgctctggggatcagtgtccctcaccatggtcaccctggtcaccctgcctctgcttttccttctgcccaagaaggtgggaaaatggtaccagttgctggaagtgcaggtgcgggaatctctggcaaagtccagccaggtggccattgaggctctgtcggccatgcctacagttcgaagctttgccaacgaggagggcgaagcccagaagtttagggaaaagctgcaagaaataaagacactcaaccagaaggaggctgtggcctatgcagtcaactcctggaccactagtatttcaggtatgctgctgaaagtgggaatcctctacattggtgggcagctggtgaccagtggggctgtaagcagtgggaaccttgtcacatttgttctctaccagatgcagttcacccaggctgtggaggtactgctctccatctaccccagagtacagaaggctgtgggctcctcagagaaaatatttgagtacctggaccgcacccctcgctgcccacccagtggtctgttgactcccttacacttggagggccttgtccagttccaagatgtctcctttgcctacccaaaccgcccagatgtcttagtgctacaggggctgacattcaccctacgccctggcgaggtgacggcgctggtgggacccaatgggtctgggaagagcacagtggctgccctgctgcagaatctgtaccagcccaccgggggacagctgctgttggatgggaagccccttccccaatatgagcaccgctacctgcacaggcaggtggctgcagtgggacaagagccacaggtatttggaagaagtcttcaagaaaatattgcctatggcctgacccagaagccaactatggaggaaatcacagctgctgcagtaaagtctggggcccatagtttcatctctggactccctcagggctatgacacagaggtaggcgaggctgggagccagctgtcagggggtcagcgacaggcagtggcgttggcccgagcattgatccggaaaccgtgtgtacttatcctggatgatgccaccagtgccctggatgcaaacagccagttacaggtggagcagctcctgtacgaaagccctgagcggtactcccgctcagtgcttctcatcacccagcacctcagcctggtggagcaggctgaccacatcctctttctggaaggaggcgctatccgggaggggggaacccaccagcagctcatggagaaaaaggggtgctactgggccatggtgcaggctcctgcagatgctccagaatga

SEQ ID NO: 146 - DNA, 2247 bp, Homo sapiens
atggctagctctaggtgtcccgctccccgcgggtgccgctgcctccccggagcttctctcgcatggctggggacagtactgctacttctcgccgactgggtgctgctccggaccgcgctgccccgcatattctccctgctggtgcccaccgcgctgccactgctccgggtctgggcggtgggcctgagccgctgggccgtgctctggctgggggcctgcggggtcctcagggcaacggttggctccaagagcgaaaacgcaggtgcccagggctggctggctgctttgaagccattagctgcggcactgggcttggccctgccgggacttgccttgttccgagagctgatctcatggggagcccccgggtccgcggatagcaccaggctactgcactggggaagtcaccctaccgccttcgttgtcagttatgcagcggcactgcccgcagcagccctgtggcacaaactcgggagcctctgggtgcccggcggtcagggcggctctggaaaccctgtgcgtcggcttctaggctgcctgggctcggagacgcgccgcctctcgctgttcctggtcctggtggtcctctcctctcttggggagatggccattccattctttacgggccgcctcactgactggattctacaagatggctcagccgataccttcactcgaaacttaactctcatgtccattctcaccatagccagtgcagtgctggagttcgtgggtgacgggatctataacaacaccatgggccacgtgcacagccacttgcagggagaggtgtttggggctgtcctgcgccaggagacggagtttttccaacagaaccagacaggtaacatcatgtctcgggtaacagaggacacgtccaccctgagtgattctctgagtgagaatctgagcttatttctgtggtacctggtgcgaggcctatgtctcttggggatcatgctctggggatcagtgtccctcaccatggtcaccctggtcaccctgcctctgcttttccttctgcccaagaaggtgggaaaatggtaccagttgctggaagtgcaggtgcgggaatctctggcaaagtccagccaggtggccattgaggctctgtcggccatgcctacagttcgaagctttgccaacgaggagggcgaagcccagaagtttagggaaaagctgcaagaaataaagacactcaaccagaaggaggctgtggcctatgcagtcaactcctggaccactagtatttcaggtatgctgctgaaagtgggaatcctctacattggtgggcagctggtgaccagtggggctgtaagcagtgggaaccttgtcacatttgttctctaccagatgcagttcacccaggctgtggaggtactgctctccatctaccccagagtacagaaggctgtgggctcctcagagaaaatatttgagtacctggaccgcacccctcgctgcccacccagtggtctgttgactcccttacacttggagggccttgtccagttccaagatgtctcctttgcctacccaaaccgcccagatgtcttagtgctacaggggctgacattcaccctacgccctggcgaggtgacggcgctggtgggacccaatgggtctgggaagagcacagtggctgccctgctgcagaatctgtaccagcccaccgggggacagctgctgttggatgggaagccccttccccaatatgagcaccgctacctgcacaggcaggtggctgcagtgggacaagagccacaggtatttggaagaagtcttcaagaaaatattgcctatggcctgacccagaagccaactatggaggaaatcacagctgctgcagtaaagtctggggcccatagtttcatctctggactccctcagggctatgacacagaggtagacgaggctgggagccagctgtcagggggtcagcgacaggcagtggcgttggcccgagcattgatccggaaaccgtgtgtacttatcctggatgatgccaccagtgccctggatgcaaacagccagttacaggtggagcagctcctgtacgaaagccctgagcggtactcccgctcagtgcttctcatcacccagcacctcagcctggtggagcaggctgaccacatcctctttctggaaggaggcgctatccgggaggggggaacccaccagcagctcatggagaaaaaggggtgctactgggccatggtgcaggctcctgcagatgctccagaatga

SEQ ID NO: 147 - DNA, 3041 bp, Homo sapiens
ggcacgagggattacttagagaggcacagaggagagagatcggggtgagtcgccatggggactcccagggcccagcacccgccgcctccccagctgctgttcctaattctgctgagctgtccctggatccagggtctgcccctgaaggaggaggagatattgccagagcctggaagtgagacccccacggtggcctctgaggccctggctgaactgcttcatggggccctgctgaggaggggcccagagatgggctacctgccaggatctgatccggaccccacgctagccacccctccggccggccagactctcgcagtgccctccctgccacgggccactgagccggggacagggcctctgacaacagccgtcacccctaacggggtcaggggggcaggccccactgcgccagaactgctgaccccgcccccaggaaccacagccccacccccacccagccctgcctccccagggcctccccttgggcctgagggaggagaggaggagacgacgaccaccatcatcaccacgacaactgttaccactacggtgaccagcccagcctacctcctgagctgtggcttccctccccggccggcccatggggacgtgagtgtgacggacctgcaccctgggggcactgccacctttcactgtgattcgggctaccagctgcagggagaggagaccctcatctgcctcaatggcacccggccatcctggaacggtgaaacccccagctgcatggcatcctgtggtggcaccatccacaatgccaccctgggccgcatcgtgtccccagagcctgggggagccgtagggcccaacctcacctgccgttgggtcattgaagcagctgaggggcgccggctgcacctgcactttgaaagggtctcgctggatgaggacaatgaccggctgatggtgcgctcagggggcagccccctatcccccgtgatctatgattcggacatggacgatgtccccgagcggggtctcatcagtgacgcccagtccctctacgtggagctgctgtcagagacacctgccaatcccctgctgttaagccttcgatttgaagcctttgaggaggatcgctgcttcgcccccttcctggcacatggaaatgtcactaccacggaccctgagtatcgcccaggggcactggcaaccttctcgtgcctcccaggatatgccctggagccccctgggccccccaatgccatcgaatgtgtggatcccacagaaccccactggaacgacacagagccggcctgcaaagccatgtgtggaggggagctgtcggaaccagctggcgtggtcctctctcccgactggccccagagctatagcccgggccaagactgcgtgtggggcgtgcacgtccaggaagagaagcgcatcttgctccaagttgagatattgaatgtgcgggaaggggacatgctgacgctgttcgacggggacggtcccagcgcccgagtcttggcccagctgcggggacctcagccgcgccgccgccttctctcctctgggcccgacctcacactgcagtttcaggcaccgcccgggcccccaaatccaggcctgggccagggcttcgtattgcacttcaaagaggtcccgaggaacgacacgtgccccgagctgccacctccggagtggggctggagaacggcatcccacggggacctgatccggggcacggtgctcacctaccagtgcgagcctggctacgagctgctaggctccgacattctcacttgccagtgggacctgtcttggagcgccgcgccgcccgcctgccaaaagatcatgacttgtgctgaccctggcgagattgccaacgggcaccgcaccgcctcggacgccggcttccccgttggctcccacgtccagtaccgctgcctgccagggtacagcctcgagggggcagccatgctcacctgctacagccgggacacaggcacacccaagtggagcgatagggtccccaaatgcgccttgaagtacgagccgtgcctgaacccgggggttcccgagaatggctaccagacgctgtacaagcaccactaccaggcgggcgagtctctgcgcttcttctgctatgagggctttgagcttatcggcgaggtcaccatcacctgtgtgcccggccacccctcccagtggaccagccagcccccactctgcaaagttgcctatgaggagctcctggacaaccgaaaactggaagtgacccagaccacagatccatcacggcagctggaaggggggaacctggccctggccatcctgctgcctctaggcttggtcattgtcctcggcagtggcgtttacatctactacaccaagcttcagggaaagtcccttttcggcttctcgggctcccactcctacagccccatcaccgtggagtcggacttcagcaacccgctgtatgaagctggggatacgcgggagtatgaagtttccatctgaaccccaagactacagctgcaggacccaggacgcccctcccctcctcattcgggcagagggaaatacgggacccggtctctgcctcctggctgccctcctccctggctgtgtaaatagtctccctatcccacgagggggctttgatggccctggagatcctacagtaaataaaccagcatcctgccgcccaaagccgcctcttctcagttgccaaacgaggggcctgccccccgccctaccggcttttggattctgggaggggaactctgcctccctgcaaatcttgcagcccctcctgcccagggcacccctcaaggactgcccccgatagctctactgttcccttggccacgaaggtgcccccctcccagatgccctggccctaggcctgactccggccaggagggtcagaagaaggacaaaggggagagctgggacaaggccttgcccccttcctgccatctccccaacccacagtctctccacctttgcttctgaattcttgtttttgagcaataaacagaaaatcgccacttgtaaaaaaaaaaaaaaaaaaa

SEQ ID NO: 148 - DNA, 2855 bp, Homo sapiens
cgcccgggcaggtcggagacggaggaaaggtggcagccagattacttagagaggcacagaggagagagatcggggtgagtcgccatggggactcccagggcccagcacccgccgcctccccagctgctgttcctaattctgctgagctgtccctggatccagggtctgcccctgaaggaggaggagatattgccagagcctggaagtgagacccccacggtggcctctgaggccctggctgaactgcttcatggggccctgctgaggaggggcccagagatgggctacctgccagggcctccccttgggcctgagggaggagaggaggagacgacgaccaccatcatcaccacgacaactgttaccactacggtgaccagcccagttctgtgtaataacaacatctccgagggcgaagggtatgtggagtctccagatctggggagccccgtcagccgcaccctggggctcctggactgcacttacagcatccatgtctaccctggctacggcattgagatccaggtgcagacgctgaacctgtcacaggaagaggagctcctggtgctggctggtgggggatccccaggcctggccccccgactcctggccaactcatccatgcttggagaaggacaagtccttcggagcccaaccaaccggctgcttctgcacttccagagcccacgggtcccaaggggcggtggcttcaggatccactatcaggcctacctcctgagctgtggcttccctccccggccggcccatggggacgtgagtgtgacggacctgcaccctgggggcactgccacctttcactgtgattcgggctaccagctgcagggagaggagaccctcatctgcctcaatggcacccggccatcctggaacggtgaaacccccagctgcatggcatcctgtggtggcaccatccacaatgccaccctgggccgcatcgtgtccccagagcctgggggagccgtagggcccaacctcacctgccgttgggtcattgaagcagctgaggggcgccggctgcacctgcactttgaaagggtctcgctggatgaggacaatgaccggctgatggtgcgctcagggggcagccccctatcccccgtgatctatgattcggacatggacgatgtccccgagcggggtctcatcagtgacgcccagtccctctacgtggagctgctgtcagagacacctgccaatcccctgctgttaagccttcgatttgaagcctttgaggaggatcgctgcttcgcccccttcctggcacatggaaatgtcactaccacggaccctgagtatcgcccaggggcactggcaaccttctcgtgcctcccaggatatgccctggagccccctgggccccccaatgccatcgaatgtgtggatcccacagaaccccactggaacgacacagagccggcctgcaaagccatgtgtggaggggagctgtcggaaccagctggcgtggtcctctctcccgactggccccagagctatagcccgggccaagactgcgtgtggggcgtgcacgtccaggaagagaagcgcatcttgctccaagttgagatattgaatgtgcgggaaggggacatgctgacgctgttcgacggggacggtcccagcgcccgagtcttggcccagctgcggggacctcagccgcgccgccgccttctctcctctgggcccgacctcacactgcagtttcaggcaccgcccgggcccccaaatccaggcctgggccagggcttcgtattgcacttcaaagaggtcccgaggaacgacacgtgccccgagctgccacctccggagtggggctggagaacggcatcccacggggacctgatccggggcacggtgctcacctaccagtgcgagcctggctacgagctgctaggctccgacattctcacttgccagtgggacctgtcttggagcgccgcgccgcccgcctgccaaaagatcatgacttgtgctgaccctggcgagattgccaacgggcaccgcaccgcctcggacgccggcttccccgttggctcccacgtccagtaccgctgcctgccagggtacagcctcgagggggcagccatgctcacctgctacagccgggacacaggcacacccaagtggagcgatagggtccccaaatgcgccttgaagtacgagccgtgcctgaacccgggggttcccgagaatggctaccagacgctgtacaagcaccactaccaggcgggcgagtctctgcgcttcttctgctatgagggctttgagcttatcggcgaggtcaccatcacctgtgtgcccggccacccctcccagtggaccagccagcccccactctgcaaagttgcctatgaggagctcctggacaaccgaaaactggaagtgacccagaccacagatccatcacggcagctggaaggggggaacctggccctggccatcctgctgcctctaggcttggtcattgtcctcggcagtggcgtttacatctactacaccaagcttcagggaaagtcccttttcggcttctcgggctcccactcctacagccccatcaccgtggagtcggacttcagcaacccgctgtatgaagctggggatacgcgggagtatgaagtttccatctgaaccccaagactacagctgcaggacccaggacgcccctcccctcctcattcgggcagagggaaatacgggacccggtctctgcctcctggctgccctcctccctggctgtgtaaatagtctccctatcccacgagggggctttgatggccctggagatcctacagtaaataaaccagcatcctgccgcccaaaaaaaaaaaaaaaaaaaa

SEQ ID NO: 149 - DNA, 2855 bp, Homo sapiens
cgcccgggcaggtcggagacggaggaaaggtggcagccagattacttagagaggcacagaggagagagatcggggtgagtcgccatggggactcccagggcccagcacccgccgcctccccagctgctgttcctaattctgctgagctgtccctggatccagggtctgcccctgaaggaggaggagatattgccagagcctggaagtgagacccccacggtggcctctgaggccctggctgaactgcttcatggggccctgctgaggaggggcccagagatgggctacctgccagggcctccccttgggcctgagggaggagaggaggagacgacgaccaccatcatcaccacgacaactgttaccactacggtgaccagcccagttctgtgtaataacaacatctccgagggcgaagggtatgtggagtctccagatctggggagccccgtcagccgcaccctggggctcctggactgcacttacagcatccatgtctaccctggctacggcattgagatccaggtgcagacgctgaacctgtcacaggaagaggagctcctggtgctggctggtgggggatccccaggcctggccccccgactcctggccaactcatccatgcttggagaaggacaagtccttcggagcccaaccaaccggctgcttctgcacttccagagcccacgggtcccaaggggcggtggcttcaggatccactatcaggcctacctcctgagctgtggcttccctccccggccggcccatggggacgtgagtgtgacggacctgcaccctgggggcactgccacctttcactgtgattcgggctaccagctgcagggagaggagaccctcatctgcctcaatggcacccggccatcctggaacggtgaaacccccagctgcatggcatcctgtggtggcaccatccacaatgccaccctgggccgcatcgtgtccccagagcctgggggagccgtagggcccaacctcacctgccgttgggtcattgaagcagctgaggggcgccggctgcacctgcactttgaaagggtctcgctggatgaggacaatgaccggctgatggtgcgctcagggggcagccccctatcccccgtgatctatgattcggacatggacgatgtccccgagcggggtctcatcagtgacgcccagtccctctacgtggagctgctgtcagagacacctgccaatcccctgctgttaagccttcgatttgaagcctttgaggaggatcgctgcttcgcccccttcctggcacatggaaatgtcactaccacggaccctgagtatcgcccaggggcactggcaaccttctcgtgcctcccaggatatgccctggagccccctgggccccccaatgccatcgaatgtgtggatcccacagaaccccactggaacgacacagagccggcctgcaaagccatgtgtggaggggagctgtcggaaccagctggcgtggtcctctctcccgactggccccagagctatagcccgggccaagactgcgtgtggggcgtgcacgtccaggaagagaagcgcatcttgctccaagttgagatattgaatgtgcgggaaggggacatgctgacgctgttcgacggggacggtcccagcgcccgagtcttggcccagctgcggggacctcagccgcgccgccgccttctctcctctgggcccgacctcacactgcagtttcaggcaccgcccgggcccccaaatccaggcctgggccagggcttcgtattgcacttcaaagaggtcccgaggaacgacacgtgccccgagctgccacctccgtagtggggctggagaacggcatcccacggggacctgatccggggcacggtgctcacctaccagtgcgagcctggctacgagctgctaggctccgacattctcacttgccagtgggacctgtcttggagcgccgcgccgcccgcctgccaaaagatcatgacttgtgctgaccctggcgagattgccaacgggcaccgcaccgcctcggacgccggcttccccgttggctcccacgtccagtaccgctgcctgccagggtacagcctcgagggggcagccatgctcacctgctacagccgggacacaggcacacccaagtggagcgatagggtccccaaatgcgccttgaagtacgagccgtgcctgaacccgggggttcccgagaatggctaccagacgctgtacaagcaccactaccaggcgggcgagtctctgcgcttcttctgctatgagggctttgagcttatcggcgaggtcaccatcacctgtgtgcccggccacccctcccagtggaccagccagcccccactctgcaaagttgcctatgaggagctcctggacaaccgaaaactggaagtgacccagaccacagatccatcacggcagctggaaggggggaacctggccctggccatcctgctgcctctaggcttggtcattgtcctcggcagtggcgtttacatctactacaccaagcttcagggaaagtcccttttcggcttctcgggctcccactcctacagccccatcaccgtggagtcggacttcagcaacccgctgtatgaagctggggatacgcgggagtatgaagtttccatctgaaccccaagactacagctgcaggacccaggacgcccctcccctcctcattcgggcagagggaaatacgggacccggtctctgcctcctggctgccctcctccctggctgtgtaaatagtctccctatcccacgagggggctttgatggccctggagatcctacagtaaataaaccagcatcctgccgcccaaaaaaaaaaaaaaaaaaaa

SEQ ID NO: 150 - DNA, 2799 bp, Homo sapiens
cgcccgggcaggtcggagacggaggaaaggtggcagccagattacttagagaggcacagaggagagagatcggggtgagtcgccatggggactcccagggcccagcacccgccgcctccccagctgctgttcctaattctgctgagctgtccctggatccagggtctgcccctgaaggaggaggagatattgccagagcctggaagtgagacccccacggtggcctctgaggccctggctgaactgcttcatggggccctgctgaggaggggcccagagatgggctacctgccagggcctccccttgggcctgagggaggagaggaggagacgacgaccaccatcatcaccacgacaactgttaccactacggtgaccagcccagttctgtgtaataacaacatctccgagggcgaagggtatgtggagtctccagatctggggagccccgtcagccgcaccctggggctcctggactgcacttacagcatccatgtctaccctggctacggcattgagatccaggtgcagacgctgaacctgtcacaggaagaggagctcctggtgctggctggtgggggatccccaggcctggccccccgactcctggccaactcatccatgcttggagaaggacaagtccttcggagcccaaccaaccggctgcttctgcacttccagagcccacgggtcccaaggggcggtggcttcaggatccactatcaggcctacctcctgagctgtggcttccctccccggccggcccatggggacgtgagtgtgacggacctgcaccctgggggcactgccacctttcactgtgattcgggctaccagctgcagggagaggagaccctcatctgcctcaatggcacccggccatcctggaacggtgaaacccccagctgcatggcatcctgtggtggcaccatccacaatgccaccctgggccgcatcgtgtccccagagcctgggggagccgtagggcccaacctcacctgccgttgggtcattgaagcagctgaggggcgccggctgcacctgcactttgaaagggtctcgctggatgaggacaatgaccggctgatggtgcgctcagggggcagccccctatcccccgtgatctatgattcggacatggacgatgtycccgagcggggtctcatcagtgacgcccagtccctctacgtggagctgctgtcagagacacctgccaatcccctgctgttaagccttcgatttgaagcctttgaggaggatcgctgcttcgcccccttcctggcacatggaaatgtcactaccacggaccctgagtatcgcccaggggcactggcaaccttctcgtgcctcccaggatatgccctggagccccctgggccccccaatgccatcgaatgtgtggatcccacagaaccccactggaacgacacagagccggcctgcaaagccatgtgtggaggggagctgtcggaaccagctggcgtggtcctctctcccgactggccccagagctatagcccgggccaagactgcgtgtggggcgtgcacgtccaggaagagaagcgcatcttgctccaagttgagatattgaatgtgcgggaaggggacatgctgacgctgttcgacggggacggtcccagcgcccgagtcttggcccagctgcggggacctcagccgcgccgccgccttctctcctctgggcccgacctcacactgcagtttcaggcaccgcccgggcccccaaatccaggcctgggccagggcttcgtattgcacttcaaagaggtcccgaggaacgacacgtgccccgagctgccacctccggagtggggctggagaacggcatcccacggggacctgatccggggcacggtgctcacctaccagtgcgagcctggctacgagctgctaggctccgacattctcacttgccagtgggacctgtcttggagcgccgcgccgcccgcctgccaaaagatcatgacttgtgctgaccctggcgagattgccaacgggcaccgcaccgcctcggacgccggcttccccgttggctcccacgtccagtaccgctgcctgccagggtacagcctcgagggggcagccatgctcacctgctacagccgggacacaggcacacccaagtggagcgatagggtccccaaatgcgccttgaagtacgagccgtgcctgaacccgggggttcccgagaatggctaccagacgctgtacaagcaccactaccaggcgggcgagtctctgcgcttcttctgctatgagggctttgagcttatcggcgaggtcaccatcacctgtgtgcccggccacccctcccagtggaccagccagcccccactctgcaaagtgacccagaccacagatccatcacggcagctggaaggggggaacctggccctggccatcctgctgcctctaggcttggtcattgtcctcggcagtggcgtttacatctactacaccaagcttcagggaaagtcccttttcggcttctcgggctcccactcctacagccccatcaccgtggagtcggacttcagcaacccgctgtatgaagctggggatacgcgggagtatgaagtttccatctgaaccccaagactacagctgcaggacccaggacgcccctcccctcctcattcgggcagagggaaatacgggacccggtctctgcctcctggctgccctcctccctggctgtgtaaatagtctccctatcccacgagggggctttgatggccctggagatcctacagtaaataaaccagcatcctgccgcccaaa

SEQ ID NO: 151 - DNA, 1748 bp, Homo sapiens
gacgcccagtccctctacgtggagctgctgtcagagacacctgccaatcccctgctgttaagccttcgatttgaagcctttgaggaggatcgctgcttcgcccccttcctggcacatggaaatgtcactaccacggaccctgagtatcgcccaggggcactggcaaccttctcgtgcctcccaggatatgccctggagccccctgggccccccaatgccatcgaatgtgtggatcccacagaaccccactggaacgacacagagccggcctgcaaagccatgtgtggaggggagctgtcggaaccagctggcgtggtcctctctcccgactggccccagagctatagcccgggccaagactgcgtgtggggcgtgcacgtccaggaagagaagcgcatcttgctccaagttgagatattgaatgtgcgggaaggggacatgctgacgctgttcgacggggacggtcccagcgaccgagtcttggcccagctgcggggacctcagccgcgccaagactcggggacggtcccagcgcccgagtcttggcccagctgcggggacctcagccgcgccgccgccttctctcctctgggcccgacctcacactgcagtttcaggcaccgcccgggcccccaaatccaggcctgggccagggcttcgtattgcacttcaaagaggtcccgaggaacgacacgtgccccgagctgccacctccggagtggggctggagaacggcatcccacggggacctgatccggggcacggtgctcacctaccagtgcgagcctggctacgagctgctaggctccgacattctcacttgccagtgggacctgtcttggagcgccgcgccgcccgcctgccaaaagatcatgacttgtgctgaccctggcgagattgccaacgggcaccgcaccgcctcggacgccggcttccccgttggctcccacgtccagtaccgctgcctgccagggtacagcctcgagggggcagccatgctcacctgctacagccgggacacaggcacacccaagtggagcgatagggtccccaaatgcgccttgaagtacgagccgtgcctgaacccgggggttcccgagaatggctaccagacgctgtacaagcaccactaccaggcgggcgagtctctgcgcttcttctgctatgagggctttgagcttatcggcgaggtcaccatcacctgtgtgcccggccacccctcccagtggaccagccagcccccactctgcaaagttgcctatgaggagctcctggacaaccgaaaactggaagtgacccagaccacagatccatcacggcagctggaaggggggaacctggccctggccatcctgctgcctctaggcttggtcattgtcctcggcagtggcgtttacatctactacaccaagcttcagggaaagtcccttttcggcttctcgggctcccactcctacagccccatcaccgtggagtcggacttcagcaacccgctgtatgaagctggggatacgcgggagtatgaagtttccatctgaaccccaagactacagctgcaggacccaggacgcccctcccctcctcattcgggcagagggaaatacgggacccggtctctgcctcctggctgccctcctccctggctgtgtaaatagtctccctatcccacgagggggctttgatggccctggagatcctacagtaaataaaccagcatcctgccgcccaaaaaaaaaaaaaaaaaaaaa

SEQ ID NO: 152 - DNA, 2855 bp, Homo sapiens; identical to SEQ ID NO: 148

SEQ ID NO: 153 - DNA, 2446 bp, Homo sapiens
gtgtaataacaacatctccgagggcgaagggtatgtggagtctccagatctggggagccccgtcagccgcaccctggggctcctggactgcacttacagcatccatgtctaccctggctacggcattgagatccaggtgcagacgctgaacctgtcacaggaagaggagctcctggtgctggctggtgggggatccccaggcctggccccccgactcctggccaactcatccatgcttggagaaggacaagtccttcggagcccaaccaaccggctgcttctgcacttccagagcccacgggtcccaaggggcggtggcttcaggatccactatcaggcctacctcctgagctgtggcttccctccccggccggcccatggggacgtgagtgtgacggacctgcaccctgggggcactgccacctttcactgtgattcgggctaccagctgcagggagaggagaccctcatctgcctcaatggcacccggccatcctggaacggtgaaacccccagctgcatggcatcctgtggtggcaccatccacaatgccaccctgggccgcatcgtgtccccagagcctgggggagccgtagggcccaacctcacctgccgttgggtcattgaagcagctgaggggcgccggctgcacctgcactttgaaagggtctcgctggatgaggacaatgaccggctgatggtgcgctcagggggcagccccctatcccccgtgatctatgattcggacatggacgatgtccccgagcggggtctcatcagtgacgcccagtccctctacgtggagctgctgtcagagacacctgccaatcccctgctgttaagccttcgatttgaagcctttgaggaggatcgctgcttcgcccccttcctggcacatggaaatgtcactaccacggaccctgagtatcgcccaggggcactggcaaccttctcgtgcctcccaggatatgccctggagccccctgggccccccaatgccatcgaatgtgtggatcccacagaaccccactggaacgacacagagccggcctgcaaagccatgtgtggaggggagctgtcggaaccagctggcgtggtcctctctcccgactggccccagagctatagcccgggccaagactgcgtgtggggcgtgcacgtccaggaagagaagcgcatcttgctccaagttgagatattgaatgtgcgggaaggggacatgctgacgctgttcgacggggacggtcccagcgcccgagtcttggcccagctgcggggacctcagccgcgccgccgccttctctcctctgggcccgacctcacactgcagtttcaggcaccgcccgggcccccaaatccaggcctgggccagggcttcgtattgcacttcaaagaggtcccgaggaacgacacgtgccccgagctgccacctccggagtggggctggagaacggcatcccacggggacctgatccggggcacggtgctcacctaccagtgcgagcctggctacgagctgctaggctccgacattctcacttgccagtgggacctgtcttggagcgccgcgccgcccgcctgccaaaagatcatgacttgtgctgaccctggcgagattgccaacgggcaccgcaccgcctcggacgccggcttccccgttggctcccacgtccagtaccgctgcctgccagggtacagcctcgagggggcagccatgctcacctgctacagccgggacacaggcacacccaagtggagcgatagggtccccaaatgcgccttgaagtacgagccgtgcctgaacccgggggttcccgagaatggctaccagacgctgtacaagcaccactaccaggcgggcgagtctctgcgcttcttctgctatgagggctttgagcttatcggcgaggtcaccatcacctgtgtgcccggccacccctcccagtggaccagccagcccccactctgcaaagttgcctatgaggagctcctggacaaccgaaaactggaagtgacccagaccacagatccatcacggcagctggaaggggggaacctggccctggccatcctgctgcctctaggcttggtcattgtcctcggcagtggcgtttacatctactacaccaagcttcagggaaagtcccttttcggcttctcgggctcccactcctacagccccatcaccgtggagtcggacttcagcaacccgctgtatgaagctggggatacgcgggagtatgaagtttccatctgaaccccaagactacagctgcaggacccaggacgcccctcccctcctcattcgggcagagggaaatacgggacccggtctctgcctcctggctgccctcctccctggctgtgtaaatagtctccctatcccacgagggggctttgatggccctggagatcctacagtaaataaaccagcatcctgccgcct

SEQ ID NO: 154 - DNA, 2476 bp, Homo sapiens
tgttaccactacggtgaccagcccagttctgtgtaataacaacatctccgagggcgaagggtatgtggagtctccagatctggggagccccgtcagccgcaccctggggctcctggactgcacttacagcatccatgtctaccctggctacggcattgagatccaggtgcagacgctgaacctgtcacaggaagaagggctcctggtgctggctggtgggggatccccaggcctggccccccgactcctggccaactcatccatgcttggagaaggacaagtccttcggagcccaaccaaccggctgcttctgcacttccagagcccacgggtcccaaggggcggtggcttcaggatccactatcaggcctacctcctgagctgtggcttccctccccggccggcccatggggacgtgagtgtgacggacctgcaccctgggggcactgccacctttcactgtgattcgggctaccagctgcagggagaggagaccctcatctgcctcaatggcacccggccatcctggaacggtgaaacccccagctgcatggcatcctgtggtggcaccatccacaatgccaccctgggccgcatcgtgtccccagagcctgggggagccgtagggcccaacctcacctgccgttgggtcattgaagcagctgaggggcgccggctgcacctgcactttgaaagggtctcgctggatgaggacaatgaccggctgatggtgcgctcagggggcagccccctatcccccgtgatctatgattcggacatggacgatgtccccgagcggggtctcatcagtgacgcccagtccctctacgtggagctgctgtcagagacacctgccaatcccctgctgttaagccttcgatttgaagcctttgaggaggatcgctgcttcgcccccttcctggcacatggaaatgtcactaccacggaccctgagtatcgcccaggggcactggcaaccttctcgtgcctcccaggatatgccctggagccccctgggccccccaatgccatcgaatgtgtggatcccacagaaccccactggaacgacacagagccggcctgcaaagccatgtgtggaggggagctgtcggaaccagctggcgtggtcctctctcccgactggccccagagctatagcccgggccaagactgcgtgtggggcgtgcacgtccaggaagagaagcgcatcttgctccaagttgagatattgaatgtgcgggaaggggacatgctgacgctgttcgacggggacggtcccagcgcccgagtcttggcctagctgcggggacctcagccgcgccgccgccttctctcctctgggcccgacctcacactgcagtttcaggcaccgcccgggcccccaaatccaggcctgggccagggcttcgtattgcacttcaaagaggtcccgaggaacgacacgtgccccgagctgccacctccggagtggggctggagaacggcatcccacggggacctgatccggggcacggtgctcacctaccagtgcgagcctggctacgagctgctaggctccgacattctcacttgccagtgggacctgtcttggagcgccgcgccgcccgcctgccaaaagatcatgacttgtgctgaccctggcgagattgccaacgggcaccgcaccgcctcggacgccggcttccccgttggctcccacgtccagtaccgctgcctgccagggtacagcctcgagggggcagccatgctcacctgctacagccgggacacaggcacacccaagtggagcgatagggtccccaaatgcgccttgaagtacgagccgtgcctgaacccgggggttcccgagaatggctaccagacgctgtacaagcaccactaccaggcgggcgagtctctgcgcttcttctgctatgagggctttgagcttatcggcgaggtcaccatcacctgtgtgcccggccacccctcccagtggaccagccagcccccactctgcaaagttgcctatgaggagctcctggacaaccgaaaactggaagtgacccagaccacagatccatcacggcagctggaaggggggaacctggccctggccatcctgctgcctctaggcttggtcattgtcctcggcagtggcgtttacatctactacaccaagcttcagggaaagtcccttttcggcttctcgggctcccactcctacagccccatcaccgtggagtcggacttcagcaacccgctgtatgaagctggggatacgcgggagtatgaagtttccatctgaaccccaagactacagctgcaggacccaggacgcccctcccctcctcattcgggcagagggaaatacgggacccggtctctgcctcctggctgccctcctccctggctgtgtaaatagtctccctatcccacgagggggctttgatggccctggagatcctacagtaaataaaccagcatcctgccgccc

SEQ ID NO: 155 - DNA, 1470 bp, Homo sapiens
gtcgtcgcggcaccggtgggagctaggcgcgaggctcggagtgcggccagcgggcggaggcggtctcgcatcggcggcgacggagggctcaggcgtcgtcgtttgggtggggggccgctgaactgacaagcgacatttcagctcctttcacccgccggaaccccggagccggggcccgctcagccggcgttaccatgaccaaggccggtagcaagggcgggaacctccgcgacaagctggacggcaacgaactggacctgagcctcagcgacctgaatgaggtcccggtgaaggagctggctgcccttccaaaggccaccatcctggatctgtcttgtaataaactgactactctaccgtcggatttctgtggcctcacacacctggtgaagctagacctgagtaagaacaagctgcagcagctgccagcagactttggccgtctggtcaacctccagcacctggatctcctcaacaacaagctggtcaccttgcctgtcagctttgctcagctcaagaacctgaagtggttggacctgaaggataaccccctggatcctgtcctggccaaggtggcaggtgactgcttggatgagaagcagtgtaagcagtgtgcaaacaaggtgttacagcacatgaaggccgtgcaggcagatcaggagcgggagaggcagcggcggctggaagtagaacgtgaggcagagaagaagcgtgaggctaagcagcgagctaaggaagctcaggagcgggaactgcggaagcgggagaaggcggaagagaaggagcgccggagaaaggagtatgatgccctcaaagcagccaagcgggagcaggagaagaaacctaagaaggaagcaaatcaggccccgaaatctaagtctggctcccgtccccgcaagccaccaccccggaagcacactcgttcctgggctgtgctgaagctgctgctgctgctgctgctatttggtgtggcgggagggctggttgcttgtcgggtgacagagctgcagcagcagcccctctgcaccagcgtgaacaccatctatgacaatgcggtccagggtctacgccgccatgagatcctccagtgggtcctccagaccgactctcagcagtgagcttgtccccagcacctgctgcctcccagccttggagtttggattcctatggaattgggttctgctggacacaacctctttttagcatcagacctacctgccatcatcaaatggctgcagattggtacatgagacctcctctttgtaggacttcttcattccttagtcagggttccctgaaggaatgaggagaaatgggaggtggcgggggggcgtggggggcagttacctgcatgcctaaaggagtaggcttgggggtggggagagagaaaacatagccttttctagttgttatataaagctgtgtaaaggcaaaaaaaaaaaaaaaaaaaaaaaaaaaaaaaaaaaaaaa

SEQ ID NO: 156 - DNA, 2341 bp, Homo sapiens
agtgtaagcagtgtgcaaacaaggtgttacagcacatgaaggccgtgcaggcagatcaggagcgggagaggcagcggcggctggaagtagaacgtgaggcagagaagaagcgtgaggctaagcagcgagctaaggaagctcaggagcgggaactgcggaagcgggagaaggcggaagagaaggagcgccggagaaaggagtatgatgccctcaaagcagccaagcgggagcaggagaagaaacctaagaaggaagcaaatcaggccccgaaatctaagtctggctcccgtccccgcaagccaccaccccggaagcacactcgttcctgggctgtgctgaagctgctgctgctgctgctgctatttggtgtggcgggagggctggttgcttgtcgggtgacagagctgcagcagcagcccctctgcaccagcgtgaacaccatctatgacaatgcggtccagggtctacgccgccatgagatcctccagtgggtccttcagaccgactctcagcagtgagcttgttcccagcacctgctgcctcccagccttggagtttggattcctatggaattgggttctgctggacacaacctctttttagcatcagacctacctgccatcatcaaatggctgcagattggtacatgagacctcctctttgtaggacttcttcattccttagtcagggttccctgaaggaatgaggagaaatgggaggtggcgggggggcgtggggggcagttacctgcatgcctaaaggagtaggcttgggggtggggagagagaaaacatagccttttctagttgttatataaagctgtgtaaaggcaaggctcgtttctactaaatggtcagctgtcactacatttatacttttgtatgccacaaaccctttcattcctccctgggaatcagggtagatcaggaggaactgggggggactagaacaccacgctcagtaaatccagtctaaactgggaggtaggggtattcctgttttctttaggacctcagagatgtaagcattttagcagccacacaaaatctctggctatgaaagggacttcatgaccatccagtccaatataacacttgcagacagagaaactgaggtcttccatgacttgcctagtctcccagctagtttgaggcaaaactggattcccactctggtattctttcttccctttacatcattttccctcctttataatgtcctgagagaccagaactcacaccagaatcgattattcctcaggtgaagcatagactctttcatggtagacagatttcacgactcagagatagaaatctcttgctatcatcaggtcacgggcagctcctgtggagtcctgcccaacttatgtggcttccataaaatggcaacagtccaggctccttgcctaattttagagcattaactccctaattgccagtaagcaaggaggtggatctctgcaaacctacactgtctatgacagctctagttgtacttggtgtgactaaatacctcaaaggcaacctgcttctgcaggttttgaagtgtcagcttcataagacactgaggtttagaattgtttgattctagaccataactgaagggcataaatggaaacaggatatgaagggaaacaagtagcatcatggagctgaaaagtggtgcatcacccaatggctagcacaaacaaggatcacactgtccattctcttgtctgctaaattaagcattttcttgcctcctttgcttcatcttttcacaacagctggatagagggatcagaaatgactgtgtcatggtgctcattcactgcaaactcccagttgcaagctccttggctcccccggagggagcaagaatctcatagttcagagacacagagggccttttagccctaatgaccttttggatgggactgcaactcatgactatcctgatattggaagaaaggactttgttaatcttctcccccatagctctgctgcgtaggtctacatcttactcagaatcactacacattcctttagtcttcctccaagctccagagccattggtacaaatgctttattgaaactaaatacataatacacacaatgagatgaagacaatatagaagtccgcatagtcatcataatcccgttccttggccggttgaggcagctcagtggctgagcccagtcaagccaacccgcagcttcactcacgacttcaagatttgatgctaattcttttggatttctacagttattaaataagtgtctgagtggacaaaaaaaaaaaaaaaaaaaaaaaaaaaaaaaaaaaaaaaaaaaaaaaaaaaaaaaaaaaaaaaaaaaaaaaa

SEQ ID NO: 157 - DNA, 2928 bp, Homo sapiens
atctcagtggtcgcggaaggtgacgtggacacggaagtggtcgtcgtcgcggcaccggtgggagctaggcgcgaggctcggagtgcggccagcgggcggaggcggtctcgcatcggcggcgacggagggctcaggcgtcgtcgtttgggtggggggccgctgaactgacaagcgacatttcagctcctttcacccgccggaaccccggagccggggcccgctcagccggcgttaccatgaccaaggccggtagcaagggcgggaacctccgcgacaagctggacggcaacgaactggacctgagcctcagcgacctgaatgaggtcccggtgaaggagctggctgcccttccaaaggccaccatcctggatctgtcttgtaataaactgactactctaccgtcggatttctgtggcctcacacacctggtgaagctagacctgagtaagaacaagctgcagcagctgccagcagactttggccgtctggtcaacctccagcacctggatctcctcaacaacaagctggtcaccttgcctgtcagctttgctcagctcaagaacctgaagtggttggacctgaaggataaccccctggatcctgtcctggccaaggtggcaggtgactgcttggatgagaagcagtgtaagcagtgtgcaaacaaggtgttacagcacatgaaggccgtgcaggcagatcaggagcgggagaggcagcggcggctggaagtagaacgtgaggcagagaagaagcgtgaggctaagcagcgagctaaggaagctcaggagcgggaactgcggaagcgggagaaggcggaagagaaggagcgccggagaaaggagtatgatgccctcaaagcagccaagcgggagcaggagaagaaacctaagaagggagcaaatcaggccccgaaatctaagtctggctcccgtccccgcaagccaccaccccggaagcacactcgttcctgggctgtgctgaagctgctgctgctgctgctgctatttggtgtggcgggagggctggttgcttgtcgggtgacagagctgcagcagcagcccctctgcaccagcgtgaacaccatctatgacaatgcggtccagggtctacgccgccatgagatcctccagtgggtcctccagaccgactctcagcagtgagcttgtccccagcacctgctgcctcccagccttggagtttggattcctatggaattgggttctgctggacacaacctctttttagcatcagacctacctgccatcatcaaatggctgcagattggtacatgagacctcctctttgtaggacttcttcattccttagtcagggttccctgaaggaatgaggagaaatgggaggtggcgggggggcgtggggggcagttacctgcatgcctaaaggagtaggcttgggggtggggagagagaaaacatagccttttctagttgttatataaagctgtgtaaaggcaaggctcgtttctactaaatggtcagctgtcactacatttatacttttgtatgccacaaaccctttcattcctccctgggaatcagggtagatcaggaggaactgggggggactagaacaccacgctcagtaaatccagtctaaactgggaggtaggggtattcctgttttctttaggacctcagagatgtaagcattttagcagccacacaaaatctctggctatgaaagggacttcatgaccatccagtccaatataacacttgcagacagagaaactgaggtcttccatgacttgcctagtctcccagctagtttgaggcaaaactggattcccactctggtattctttcttccctttacatcattttccctcctttataatgtcctgagagaccagaactcacaccagaatcgattattcctcaggtgaagcatagactctttcatggtagacagatttcacgactcagagatagaaatctcttgctatcatcaggtcacgggcagctcctgtggagtcctgcccaacttatgtggcttccataaaatggcaacagtccaggctccttgcctaattttagagcattaactccctaattgccagtaagcaaggaggtggatctctgcaaacctacactgtctatgacagctctagttgtacttggtgtgactaaatacctcaaaggcaacctgcttctgcaggttttgaagtgtcagcttcataagacactgaggtttagaattgtttgattctagaccataactgaagggcataaatggaaacaggatatgaagggaaacaagtagcatcatggagctgaaaagtggtgcatcacccaatggctagcacaaacaaggatcacactgtccattctcttgtctgctaaattaagcattttcttgcctcctttgcttcatcttttcacaacagctggatagagggatcagaaatgactgtgtcatggtgctcattcactgcaaactcccagttgcaagctccttggctcccccggagggagcaagaatctcatagttcagagacacagagggccttttagccctaatgaccttttggatgggactgcaactcatgactatcctgatattggaagaaaggactttgttaatcttctcccccatagctctgctgcgtaggtctacatcttactcagaatcactacacattcctttagtcttcctccaagctccagagccattggtacaaatgctttattgaaactaaatacataatacacacaatgagatgaagacaatatagaagtccgcatagtcatcataatcccgttccttggccggttgaggcagctcagtggctgagcccagtcaagccaacccgcagcttcactcacgacttcaagatttgatgctaattcttttggatttctacagttattaaataagtgtctgagtggaaaaaaaaaaaaaaaaaaa

SEQ ID NO: 158 - DNA, 2920 bp, Homo sapiens
ggcacgagggagagaactagtctcgagtttttttttttttttttttttttttttttttccactcagacacttatttaataactgtagaaatccaaaagaattagcatcaaatcttgaagtcgtgagtgaagctgcgggttggcttgactgggctcagccactgagctgcctcaaccggccaaggaacgggattatgatgactatgcggacttctatattgtcttcatctcattgtgtgtattatgtatttagtttcaataaagcatttgtaccaatggctctggagcttggaggaagactaaaggaatgtgtagtgattctgagtaagatgtagacctacgcagcagagctatgggggagaagattaacaaagtcctttcttccaatatcaggatagtcatgagttgcagtcccatccaaaaggtcattagggctaaaaggccctctgtgtctctgaactatgagattcttgctccctccgggggagccaaggagcttgcaactgggagtttgcagtgaatgagcaccatgacacagtcatttctgatccctctatccagctgttgtgaaaagatgaagcaaaggaggcaagaaaatgcttaatttagcagacaagagaatggacagtgtgatccttgtttgtgctagccattgggtgatgcaccacttttcagctccatgatgctacttgtttcccttcatatcctgtttccatttatgcccttcagttatggtctagaatcaaacaattctaaacctcagtgtcttatgaagctgacacttcaaaacctgcagaagcaggttgcctttgaggtatttagtcacaccaagtacaactagagctgtcatagacagtgtaggtttgcagagatccacctccttgcttactggcaattagggagttaatgctctaaaattaggcaaggagcctggactgttgccattttatggaagccacataagttgggcaggactccacaggagctgcccgtgacctgatgatagcaagagatttctatctctgagtcgtgaaatctgtctaccatgaaagagtctatgcttcaactgaggaataatcgattctggtgtgagttctggtctctcaggacattataaaggagggaaaatgatgtaaagggaagaaagaataccagagtgggaatccagttttgcctcaaactagctgggagactaggcaagtcatggaagacctcagtttctctgtctgcaagtgttatattggactggatggtcatgaagtccctttcatagccagagattttgtgtggctgctaaaatgcttacatctctgaggtcctaaagaaaacaggaatacccctacctcccagtttagactggatttactgagcgtggtgttctagtcccccccagttcctcctgatctaccctgattcccagggaggaatgaaagggtttgtggcatacaaaagtataaatgtagtgacagctgaccatttagtagaaacgagccttgcctttacacagctttatataacaactagaaaaggctatgttttctctctccccacccccaagcctactcctttaggcatgcaggtaactgccccccacgcccccccgccacctcccatttctcctcattccttcagggaaccctgactaaggaatgaagaagtcctacaaagaggaggtctcatgtaccaatctgcagccatttgatgatggcaggtaggtctgatgctaaaaagaggttgtgtccagcagaacccaattccataggaatccaaactccaaggctgggaggcagcaggtgctggggacaagctcactgctgagagtcggtctggaggacccactggaggatctcatggcggcgtagaccctggaccgcattgtcatagatggtgttcacgctggtgcagaggggctgctgctgcagctctgtcacccgacaagcaaccagccctcccgccacaccaaatagcagcagcagcagcagcagcttcagcacagcccaggaacgagtgtgcttccggggtggtggcttgcggggacgggagccagacttagatttcggggcctgatttgcttccttcttaggtttcttctcctgctcccgcttggctgctttgagggcatcatactcctttctccggcgctccttctcttccgccttctcccgcttccgcagttcccgctcctgagcttccttagctcgctgcttagcctcacgcttcttctctgcctcacgttctacttccagccgccgctgcctctcccgctcctgatctgcctgcacggccttcatgtgctgtaacaccttgtttgcacactgcttacactgcttctcatccaagcagtcacctgccaccttggccaggacaggatccagggggttatccttcaggtccaaccacttcaggttcttgagctgagcaaagctgacaggcaaggtgaccagcttgttgttgaggagatccaggtgctggaggttgaccagacggccaaagtctgctggcagctgctgcagcttgttcttactcaggtctagcttcaccaggtgtgtgaggccacagaaatccgacggtagagtagtcagtttattacaagacagatccaggatggtggcctttggaagggcagccagctccttcaccgggacctcattcaggtcgctgaggctcaggtccagttcgttgccgtccagcttgtcgcggaggttcccgcccttgctaccggccttggtcatggtaacgccggctgagcgggccccggctccggggttccggcgggtgaaaggagctgaaatgtcgcttgtcagttcagcggccccccacccaaacgacgacgcctgagccctccgtcgccgccgatgcgagaccgcctccgcccgctggccgcactccgagcctcgcgccgagagagagagagaactagt

SEQ ID NO: 159 - DNA, 2341 bp, Homo sapiens; identical to SEQ ID NO: 156

SEQ ID NO: 160 - DNA, 4479 bp, Homo sapiens
ccacgcgtccggtgcttagcatgaagaaggccgaaatgggacgattcagtatttccccggatgaagacagcagcagctacagttccaacagcgacttcaactactcctaccccaccaagcaagctgctctgaaaagccattatgcagatgtagatcctgaaaaccagaactttttacttgaatcgaatttggggaagaagaagtatgaaacagaatttcatccaggtactacttcctttggaatgtcagtatttaatctgagcaatgcgattgtgggcagtggaatccttgggctttcttatgccatggctaatactggaattgctctttttataattctcttgacatttgtgtcaatattttccctgtattctgttcatctccttttgaagactgccaatgaaggagggtctttattatatgaacaattgggatataaggcatttggattagttggaaagcttgcagcatctggatcaattacaatgcagaacattggagctatgtcaagctacctcttcatagtgaaatatgagttgcctttggtgatccaggcattaacgaacattgaagataaaactggattgtggtatctgaacgggaactatttggttctgttggtgtcattggtggtcattcttcctttgtcgctgtttagaaatttaggatatttgggatataccagtggcctttccttgttgtgtatggtgttctttctgattgtggtcatttgcaagaaatttcaggttccgtgtcctgtggaagctgctttgataattaacgaaacaataaacaccaccttaacacagccaacagctcttgtacctgctttgtcacataacgtgactgaaaatgactcttgcagacctcactattttattttcaactcacagactgtctatgctgtgccaattctgatcttttcatttgtctgtcatcctgctgttcttcccatctatgaagaactgaaagaccgcagccgtagaagaatgatgaatgtgtccaagatttcattttttgctatgtttctcatgtatctgcttgccgccctctttggatacctaacattttacgaacatgttgagtcagaattgcttcatacctactcttctatcttgggaactgatattcttcttctcattgtccgtctggctgtgttaatggctgtgaccctgacagtaccagtagttattttcccaatccggagttctgtaactcacttgttgtgtgcatcaaaagatttcagttggtggcgtcatagtctcattacagtgtctatcttggcatttaccaatttacttgtcatctttgtcccaactattagggatatctttggttttattggtgcatctgcagcttctatgttgatttttattcttccttctgccttctatatcaagttggtgaagaaagaacctatgaaatctgtacaaaagattggggctttgttcttcctgttaagtggtgtactggtgatgaccggaagcatggccttgattgttttggattgggtacacaatgcacctggaggtggccattaattggcaccactcaaactcaaactcagtccatctgatgccagtgttgagtaaactcaactactatgaaatttcacctaatgttttcagtttcacttccttttgaagtgcagattcctcgctggttcttctgagtgcagaataagtgaacttttttgttttgttttgtttttttaagaaacttatctgtatgttagaaatggatatgaacaacaaaaccacgagtctcgggttaagggaagtgacaattttattccattccagagaatggacaaactcttaacttttatcaagccacatgcttggctgtgtcattgtttaacttggatattttatgattttacttgaatgtgcctaatggaaccatttgatgtgagaaacaattctttttaatttacagcaaaatattgaataaccattgacaaaaacactattattttttgtaccaaaaatacttaaagacctcagaagcactcttttacttttaagaaattgcttttttgaactttattcagaagcagttatcaataaattccataaaataatgtcattggtatttaaaaatgaatattaatataatgaaatggtttgcctttttgtaggcataataagccaaatacttttttacccaaaataatttttagagaaaatgatgtaatgaaaaattgtaccatgaattaggagcatagttttttccatttaaacgtcaccattacttaaaagatgattgattattgctataccaaatcagatgaactctgttcatcacttttcttctctgtccccaaacaatttggttcattcagactgaaatgtttgtgtcttcaacttattagaatggaagataatgcagatatttctgtgggaaataaaataactaattttgaggtaccaaatagtgcaattgggtaaaacagggtttattcagttgcatctgtctccagtgttgtattgacagctctgggtctttttttgggccagcccttttttgacattgcttccagcagtggaaaatgggcatttgatggcaataggccaaaattattgtgtccagagagtacactttttcaaaatgctcacctactggaagtgtgaattacttgacaatgtatggcttagttgtgttcatgttttgtctacagtagaggtctaatccacaggttacacctatgtttgatatgatataagttctctttgcgtaggccactgggtttctcatgcagtaagctttataaaaactcatttgcactggactgtcatctcattcttgtacaacgtagaattacttgtttacatccaacaaatggttagctagggaaaacagtgcaaactgagtgttagtagtcattttggtccaactgcatgtcaacccttccatttcaatcccagttagaaatgaaaataattactttgaaacttggctttaagagcacatttatcgtacgtcacagtgtatggtgaatatattattaaataatgtggtacttcgctcatcaggcataatgtctaaaatctaatatacataattccattaagtggttgaaggaagcaaataatggaattgtcaattggtcatctggctgtaaggtttgcccttgaactaaaaatgttgtttggggcaagggccagaaatgtggagacatggtttttgttacgcattcttgtattatatgtgactaaatttacaaacaagatacatgtgtaattaaagacccttatggaactggaagacgtcttgtagtgctacattgggtgaaaccgttggtccatttttgtctgtttctatgaagataaaataattgggggccatctagaaatagaaaggcagtgggaagacagattctacggcactgctttcatttaattgggctttaggcactccattcgaatgcagaacctcacctctagttgagaccaagaattggcaaatttgcatgagctcctggaaagagttgctgactttgtatctaagacctgccagggaataccaagagttgtttctacagacttttttttttttttttgtatgggagaagatactgtggcaaccaggaaggaatggaaaaaaaattcttttctctacagcaaattaatgtgaggaagctcctccaatcctctggctatttaaggttcaaaatcaagtgcctagggaaaattccaatggatgattttctgggagctatcttgtctaccttgaggttcctgaacaatgaattcccattaatgagcagtcttcagtattaaaaccactgtcttgtcacctcattttgcattactgtcttccgtggatgtttcagttacaactgtaatgttatttatagaacaacattaatccattaaagctaacctatttttcaatatttatgataatctatgtacatatattgtctgtccatatgtatttgtaaataggttgtatataatgtcaggtttgggtcttgggttcaagtgtatatattcctgtaagtttcttaactgcattttgatgaattcaccttatgtaactataagaattgtcccaaaagtacctgtacagaaaattgaatattgaaaaattgacaaattgtgtacaaacactaaaaaaaacttgtttaaattgtatttgcaataaacaacatcaaattttttcatgaaatcttggtacaaattcagatctcttatttaaaatttaaataaggaatacattttcaaaatgcagtaatcaaaatgtgatctagtgtaatgaaataaaatgtgatctagtgtaatggaagacctttgagaacctgggtgtattaactttgtgtatatagtgtaaatatccccactgtactgttagaggccaacaattctagtatggcttgttggcaaagagtgctacaccgtttcaatgaaacaatgtatgtttgttttaactgaactaaaataaatacatgcttaatcctgaaaaaaaaaaaaaaaa

SEQ ID NO: 161 - DNA, 4384 bp, Homo sapiens
agccgcgcgacgccgccgccttagaacgcctttccagtactgctagcagcagcccgaccacgcgttaccgcacgctcgcgcctttcccttgacacggcggacgccggaggattggggcggcaatttgtcttttccttttttattaaaattatttttcctgcctgttgttggatttggggaaattttttgtttgttttttatgatttgtatttgactgagagaaacccactgaagacgtctgcgtgagaatagagaccaccgaggccgactcgcgggccgctgcacccaccgccaaggacaaaaggagcccagcgctactagctgcacccgattcctcccagtgcttagcatgaagaaggccgaaatgggacgattcagtatttccccggatgaagacagcagcagctacagttccaacagcgacttcaactactcctaccccaccaagcaagctgctctgaaaagccattatgcagatgtagatcctgaaaaccagaactttttacttgaatcgaatttggggaagaagaagtatgaaacagaatttaattctcttgacatttgtgtcaatattttccctgtattctgttcatctccttttgaagactgccaatgaaggagggtctttattatatgaacaattgggatataaggcatttggattagttggaaagcttgcagcatctggatcaattacaatgcagaatattggagctatgtcaagctacctcttcatagtgaaatatgagttgcctttggtgatccaggcattaacgaacattgaagataaaactggattgtggtatctgaacgggaactatttggttctgttggtgtcattggtggtcattcttcctttgtcgctgtttagaaatttaggatatttgggatataccagtggcctttccttgttgtgtatggtgttctttctgattgtggtcatttgcaagaaatttcaggttccgtgtcctgtggaagctgctttgataattaacgaaacaataaacaccaccttaacacagccaacagctcttgtacctgctttgtcacgtaacgtgactgaaaatgactcttgcagacctcactattttattttcaactcacagactgtctatgctgtgccaattctgatcttttcatttgtctgtcatcctgctgttcttcccatctatgaagaactgaaagaccgcagccgtagaagaatgatgaatgtgtccaagatttcattttttgctatgtttctcatgtatctgcttgccgccctctttggatacctaacattttacgaacatgttgagtcagaattgcttcatacctactcttctatcttgggaactgatattcttcttctcattgtccgtctggctgtgttaatggctgtgaccctgacagtaccagtagttattttcccaatccggagttctgtaactcacttgttgtgtgcatcaaaagatttcagttggtggcgtcatagtctcattacagtgtctatcttggcatttaccaatttacttgtcatctttgtcccaactattagggatatctttggttttattggtgcatctgcagcttctatgttgatttttattcttccttctgccttctatatcaagttggtgaagaaagaacctatgaaatctgtacaaaagattggggctttgttcttcctgttaagtggtgtactggtgatgaccggaagcatggccttgattgttttggattgggtacacaatgcacctggaggtggccattaattggcaccactcaaactcaaactcagtccatctgatgccagtgttgagtaaactcaactactatgaaatttcacctaatgttttcagtttcacttccttttgaagtgcagattcctcgctggttcttctgagtgcagaataagtgaacttttttgttttgttttgtttttttaagaaacttatctgtatgttagaaatggatatgaacaacaaaaccacgagtctcgggttaagggaagtgacaattttattccattccagagaatggacaaactcttaacttttatcaagccacatgcttggctgtgtcattgtttaacttggatattttatgattttacttgaatgtgcctaatggaaccatttgatgtgagaaacaattctttttaatttacagcaaaatattgaataaccattgacaaaaacactattattttttgtaccaaaaatacttaaagacctcagaagcactcttttacttttaagaaattgcttttttgaactttattcagaagcagttatcaataaattccataaaataatgtcattggtatttaaaaatgaatattaatataatgaaatggtttgcctttttgtaggcataataagccaaatacttttttacccaaaataatttttagagaaaatgatgtaatgaaaaattgtaccatgaattaggagcatagttttttccatttaaacgtcaccattacttaaaagatgattgattgttgctataccaaatcagatgaactctgttcatcacttttcttctctgtccccaaacaatttggttcattcagactgaaatgtttgtgtcttcaacttattagaatggaagataatgcagatatttctgtgggaaataaaataactaattttgaggtaccaaatagtgcaattgggtaaaacagggtttattcagttgcatctgtctccagtgttgtattgacagctctgggtcttttttttgggccagcccttttttgacattgcttccagcagtggaaaatgggcatttgatggcaataggccaaaattattgtgtccagggagtacactttttcaaaatgctcacctactggaagtgtgaattacttgacaatgtatggcttagttgtgttcatgttttgtctacagtagaggtctaatccacaggttacacctatgtttgatatgatataagttctctttgcgtaggccactgggtttctcatgcagtaagctttataaaaactcatttgcactggactgtcatctcattcttgtacaacgtagaattacttgtttacatccaacaaatggttagctagggaaaacagtgcaaactgagtgttagtagtcattttggtccaactgcatgtcaacccttccatttcaatcccagttagaaatgaaaataattactttgaaacttggctttaagagcacatttatcgtacgtcacagtgtatggtgaatatattattaaataatgtggtacttcgctcatcaggcataatgtctaaaatctaatatacataattccattaagtggttgaaggaagcaaataatggaattgtcaattggtcatctggctgtaaggtttgcccttgaactaaaaatgttgtttggggcaagggccagaaatgtggagacatggtttttgttacgcattcttgtattatatgtgactaaatttacaaacaagatacatgtgtaattaaagacccttatggaactggaagacgtcttgtagtgctacattgggtgaaaccgttggtccatttttgtctgtttctatgaagataaaataattgggggccatctagaaatagaaaggcagtgggaagacagattctacggcactgctttcatttaattgggctttaggcactccattcgaatgcagaacctcacctctagttgagaccaagaattggcaaatttgcatgagctcctggaaagagttgctgactttgtatctaagacctgccagggaataccaagagttgtttctacagacttttttttttttttgtatgggagaagatactgtggcaaccaggaaggaatggaaaaaaaattcttttctctacagcaaattaatgtgaggaagctcctccaatcctctggctatttaaggttcaaaatcaagtgcctagggaaaattccaatggatgattttctgggagctatcttgtctaccttgaggttcctgaacaatgaattcccattaatgagcagtcttcagtattaaaaccactgtcttgtcacctcattttgcattactgtcttccgtggatgtttcagttacaactgtaatgttatttatagaacaacattaatccattaaagctaacctatttttcaatatttatgataatctatgtacatatattgtctgtccatatgtatttgtaaataggttgtatataatgtcaggtttgggtcttgggttcaagtgtatatattcctgtaagtttcttaactgcattttgatgaattcacattatgtaactataagaattgtcccaaaagtacctgtacagaaaattgaatattgaaaaattgacaaattgtgtacaaacactaaaaaaaacttgtttaaattgtatttgcaataaacaacatcaaattttttcatgac

SEQ ID NO: 162 - DNA, 4444 bp, Homo sapiens
atgaagaaggccgaaatgggacgattcagtatttccccggatgaagacagcagcagctacagttccaacagcgacttcaactactcctaccccaccaagcaagctgctctgaaaagccattatgcagatgtagatcctgaaaaccagaactttttacttgaatcgaatttggggaagaagaagtatgaaacagaatttcatccaggtactacttcctttggaatgtcagtatttaatctgagcaatgcgattgtgggcagtggaatccttgggctttcttatgccatggctaatactggaattgctctttttataattctcttgacatttgtgtcaatattttccctgtattctgttcatctccttttgaagactgccaatgaaggagggtctttattatatgaacaattgggatataaggcatttggattagttggaaagcttgcagcatctggatcaattacaatgcagaacattggagctatgtcaagctacctcttcatagtgaaatatgagttgcctttggtgatccaggcattaacgaacattgaagataaaactggattgtggtatctgaacgggaactatttggttctgttggtgtcattggtggtcattcttcctttgtcgctgtttagaaatttaggatatttgggatataccagtggcctttccttgttgtgtatggtgttctttctgattgtggtcatttgcaagaaatttcaggttccgtgtcctgtggaagctgctttgataattaacgaaacaataaacaccaccttaacacagccaacagctcttgtacctgctttgtcacataacgtgactgaaaatgactcttgcagacctcactattttattttcaactcacagactgtctatgctgtgccaattctgatcttttcatttgtctgtcatcctgctgttcttcccatctatgaagaactgaaagaccgcagccgtagaagaatgatgaatgtgtccaagatttcattttttgctatgtttctcatgtatctgcttgccgccctctttggatacctaacattttacgaacatgttgagtcagaattgcttcatacctactcttctatcttgggaactgatattcttcttctcattgtccgtctggctgtgttaatggctgtgaccctgacagtaccagtagttattttcccaatccggagttctgtaactcacttgttgtgtgcatcaaaagatttcagttggtggcgtcatagtctcattacagtgtctatcttggcatttaccaatttacttgtcatctttgtcccaactattagggatatctttggttttattggtgcatctgcagcttctatgttgatttttattcttccttctgccttctatatcaagttggtgaagaaagaacctatgaaatctgtacaaaagattggggctttgttcttcctgttaagtggtgtactggtgatgaccggaagcatggccttgattgttttggattgggtacacaatgcacctggaggtggccattaattggcaccactcaaactcaaactcagtccatctgatgccagtgttgagtaaactcaactactatgaaatttcacctaatgttttcagtttcacttccttttgaagtgcagattcctcgctggttcttctgagtgcagaataagtgaacttttttgttttgttttgtttttttaagaaacttatctgtatgttagaaatggatatgaacaacaaaaccacgagtctcgggttaagggaagtgacaattttattccattccagagaatggacaaactcttaacttttatcaagccacatgcttggctgtgtcattgtttaacttggatattttatgattttacttgaatgtgcctaatggaaccatttgatgtgagaaacaattctttttaatttacagcaaaatattgaataaccattgacaaaaacactattattttttgtaccaaaaatacttaaagacctcagaagcactcttttacttttaagaaattgcttttttgaactttattcagaagcagttatcaataaattccataaaataatgtcattggtatttaaaaatgaatattaatataatgaaatggtttgcctttttgtaggcataataagccaaatacttttttacccaaaataatttttagagaaaatgatgtaatgaaaaattgtaccatgaattaggagcatagtttttttccatttaaacgtcaccattacttaaaagatgattgattattgctataccaaatcagatgaactctgttcatcacttttcttctctgtccccaaacaatttggttcattcagactgaaatgtttgtgtcttcaacttattagaatggaagataatgcagatatttctgtgggaaataaaataactaattttgaggtaccaaatagtgcaattgggtaaaacagggtttattcagttgcatctgtctccagtgttgtattgacagctctgggtctttttttgggccagcccttttttgacattgcttccagcagtggaaaatgggcatttgatggcaataggccaaaattattgtgtccagagagtacactttttcaaaatgctcacctactggaagtgtgaattacttgacaatgtatggcttagttgtgttcatgttttgtctacagtagaggtctaatccacaggttacacctatgtttgatatgatataagttctctttgcgtaggccactgggtttctcatgcagtaagctttataaaaactcatttgcactggactgtcatctcattcttgtacaacgtagaattacttgtttacatccaacaaatggttagctagggaaaacagtgcaaactgagtgttagtagtcattttggtccaactgcatgtcaacccttccatttcaatcccagttagaaatgaaaataattactttgaaacttggctttaagagcacatttatcgtacgtcacagtgtatggtgaatatattattaaataatgtggtacttcgctcatcaggcataatgtctaaaatctaatatacataattccattaagtggttgaaggaagcaaataatggaattgtcaattggtcatctggctgtaaggtttgcccttgaactaaaaatgttgtttggggcaagggccagaaatgtggagacatggtttttgttacgcattcttgtattatatgtgactaaatttacaaacaagatacatgtgtaattaaagacccttatggaactggaagacgtcttgtagtgctacattgggtgaaaccgttggtccatttttgtctgtttctatgaagataaaataattgggggccatctagaaatagaaaggcagtgggaagacagattctacggcactgctttcatttaattgggctttaggcactccattcgaatgcagaacctcacctctagttgagaccaagaattggcaaatttgcatgagctcctggaaagagttgctgactttgtatctaagacctgccagggaataccaagagttgtttctacagacttttttttttttttttgtatgggagaagatactgtggcaaccaggaaggaatggaaaaaaaattcttttctctacagcaaattaatgtgaggaagctcctccaatcctctggctatttaaggttcaaaatcaagtgcctagggaaaattccaatggatgattttctgggagctatcttgtctaccttgaggttcctgaacaatgaattcccattaatgagcagtcttcagtattaaaaccactgtcttgtcacctcattttgcattactgtcttccgtggatgtttcagttacaactgtaatgttatttatagaacaacattaatccattaaagctaacctatttttcaatatttatgataatctatgtacatatattgtctgtccatatgtatttgtaaataggttgtatataatgtcaggtttgggtcttgggttcaagtgtatatattcctgtaagtttcttaactgcattttgatgaattcacattatgtaactataagaattgtcccaaaagtacctgtacagaaaattgaatattgaaaaattgacaaattgtgtacaaacactaaaaaaaacttgtttaaattgtatttgcaataaacaacatcaaattttttcatgaaatcttggtacaaattcagatctcttatttaaaatttaaataaggaatacattttcaaaatgcagtaatcaaaatgtgatctagtgtaatgaaataaaatgtgatctagtgtaatggaagacctttgagaacctgggtgtattaactttgtgtatatagtgtaaatatccccactgtactgttagaggccaacaattctagtatggcttgttggcaaagagtgctacaccgtttcaatgaaacaatgtatgtttgttttaactgaactaaaataaatacatgcttaatcctg

SEQ ID NO: 163 - DNA, 2270 bp, Homo sapiens
ttttttttttgaactttattcagaagcagttatcaataaattccataaaataatgtcattggtatttaaaaatgaatattaatataatgaaatggtttgcctttttgtaggcataataagccaaatacttttttacccaaaataatttttagagaaaatgatgtaatgaaaaattgtaccatgaattaggagcatagttttttccatttaaacgtcaccattacttaaaagatgattgattattgctataccaaatcagatgaactctgttcatcacttttcttctctgtccccaaacaatttggttcattcagactgaaatgtttgtgtcttcaacttattagaatggaagataatgcagatatttctgtgggaaataaaataactaattttgaggtaccaaatagtgcaattgggtaaaacagggtttattcagttgcatctgtctccagtgttgtattgacagctctgggtctttttttgggccagcccttttttgacattgcttccagcagtggaaaatgggcatttgatggcaataggccaaaattattgtgtccagagagtacactttttcaaaatgctcacctactggaagtgtgaattacttgacaatgtatggcttagttgtgttcatgttttgtctacagtagaggtctaatccacaggttacacctatgtttgatatgatataagttctctttgcgtaggccactgggtttctcatgcagtaagctttataaaaactcatttgcactggactgtcatctcattcttgtacaacgtagaattacttgtttacatccaacaaatggttagctagggaaaacagtgcaaactgagtgttagtagtcattttggtccaactgcatgtcaacccttccatttcaatcccagttagaaatgaaaataattactttgaaacttggctttaagagcacatttatcgtacgtcacagtgtatggtgaatatattattaaataatgtggtacttcgctcatcaggcataatgtctaaaatctaatatacataattccattaagtggttgaaggaagcaaataatggaattgtcaattggtcatctggctgtaaggtttgcccttgaactaaaaatgttgtttggggcaagggccagaaatgtggagacatggtttttgttacgcattcttgtattatatgtgactaaatttacaaacaagatacatgtgtaattaaagacccttatggaactggaagacgtcttgtagtgctacattgggtgaaaccgttggtccatttttgtctgtttctatgaagataaaataattgggggccatctagaaatagaaaggcagtgggaagacagattctacggcactgctttcatttaattgggctttaggcactccattcgaatgcagaacctcacctctagttgagaccaagaattggcaaatttgcatgagctcctggaaagagttgctgactttgtatctaagacctgccagggaataccaagagttgtttctacagactttttttttttttttgtatgggagaagatactgtggcaaccaggaaggaatggaaaaaaaattcttttctctacagcaaattaatgtgaggaagctcctccaatcctctggctatttaaggttcaaaatcaagtgcctagggaaaattccaatggatgattttctgggagctatcttgtctaccttgaggttcctgaacaatgaattcccattaatgagcagtcttcagtattaaaaccactgtcttgtcacctcattttgcattactgtcttccgtggatgtttcagttacaactgtaatgttatttatagaacaacattaatccattaaagctaacctatttttcaatatttatgataatctatgtacatatattgtctgtccatatgtatttgtaaataggttgtatataatgtcaggtttgggtcttgggttcaagtgtatatattcctgtaagtttcttaactgcattttgatgaattcacattatgtaactataagaattgtcccaaaagtacctgtacagaaaattgaatattgaaaaattgacaaattgtgtacaaacactaaaaaaaacttgtttaaattgtatttgcaataaacaacatcaaattttttcatgaaatcttggtacaaattcagatctcttatttaaaatttaaataaggaatacattttcaaaatgcagtaatcaaaatgtgatctagtgtaatgaaataaaatgtgatctagtgtaatggaagacctttgaga

SEQ ID NO: 164 - DNA, 4795 bp, Homo sapiens
acagccgcgcgacgccgccgccttagaacgcctttccagtactgctagcagcagcccgaccacgcgttaccgcacgctcgcgcctttcccttgacacggcggacgccggaggattggggcggcaatttgtcttttccttttttattaaaattatttttcctgcctgttgttggatttggggaaattttttgtttgttttttatgatttgtatttgactgagagaaacccactgaagacgtctgcgtgagaatagagaccaccgaggccgactcgcgggccgctgcacccaccgccaaggacaaaaggagcccagcgctactagctgcacccgattcctcccagtgcttagcatgaagaaggccgaaatgggacgattcagtatttccccggatgaagacagcagcagctacagttccaacagcgacttcaactactcctaccccaccaagcaagctgctctgaaaagccattatgcagatgtagatcctgaaaaccagaactttttacttgaatcgaatttggggaagaagaagtatgaaacagaatttcatccaggtactacttcctttggaatgtcagtatttaatctgagcaatgcgattgtgggcagtggaatccttgggctttcttatgccatggctaatactggaattgctctttttataattctcttgacatttgtgtcaatattttccctgtattctgttcatctccttttgaagactgccaatgaaggagggtctttattatatgaacaattgggatataaggcatttggattagttggaaagcttgcagcatctggatcaattacaatgcagaacattggagctatgtcaagctacctcttcatagtgaaatatgagttgcctttggtgatccaggcattaacgaacattgaagataaaactggattgtggtatctgaacgggaactatttggttctgttggtgtcattggtggtcattcttcctttgtcgctgtttagaaatttaggatatttgggatataccagtggcctttccttgttgtgtatggtgttctttctgattgtggtcatttgcaagaaatttcaggttccgtgtcctgtggaagctgctttgataattaacgaaacaataaacaccaccttaacacagccaacagctcttgtacctgctttgtcacataacgtgactgaaaatgactcttgcagacctcactattttattttcaactcacagactgtctatgctgtgccaattctgatcttttcatttgtctgtcatcctgctgttcttcccatctatgaagaactgaaagaccgcagccgtagaagaatgatgaatgtgtccaagatttcattttttgctatgtttctcatgtatctgcttgccgccctctttggatacctaacattttacgaacatgttgagtcagaattgcttcatacctactcttctatcttgggaactgatattcttcttctcattgtccgtctggctgtgttaatggctgtgaccctgacagtaccagtagttattttcccaatccggagttctgtaactcacttgttgtgtgcatcaaaagatttcagttggtggcgtcatagtctcattacagtgtctatcttggcatttaccaatttacttgtcatctttgtcccaactattagggatatctttggttttattggtgcatctgcagcttctatgttgatttttattcttccttctgccttctatatcaagttggtgaagaaagaacctatgaaatctgtacaaaagattggggctttgttcttcctgttaagtggtgtactggtgatgaccggaagcatggccttgattgttttggattgggtacacaatgcacctggaggtggccattaattggcaccactcaaactcaaactcagtccatctgatgccagtgttgagtaaactcaactactatgaaatttcacctaatgttttcagtttcacttccttttgaagtgcagattcctcgctggttcttctgagtgcagaataagtgaacttttttgttttgttttgtttttttaagaaacttatctgtatgttagaaatggatatgaacaacaaaaccacgagtctcgggttaagggaagtgacaattttattcccattccagagaatggacaaactcttaacttttatcaagccacatgcttggctgtgtcattgtttaacttggatattttatgattttacttgaatgtgcctaatggaaccatttgatgtgagaaacaattctttttaatttacagcaaaatattgaataaccattgacaaaaacactattattttttgtaccaaaaatacttaaagacctcagaagcactcttttacttttaagaaattgcttttttgaactttattcagaagcagttatcaataaattccataaaataatgtcattggtatttaaaaatgaatattaatataatgaaatggtttgcctttttgtaggcataataagccaaatacttttttacccaaaataatttttagagaaaatgatgtaatgaaaaattgtaccatgaattaggagcatagttttttccatttaaacgtcaccattacttaaaagatgattgattattgctataccaaatcagatgaactctgttcatcacttttcttctctgtccccaaacaatttggttcattcagactgaaatgtttgtgtcttcaacttattagaatggaagataatgcagatatttctgtgggaaataaaataactaattttgaggtaccaaatagtgcaattgggtaaaacagggtttattcagttgcatctgtctccagtgttgtattgacagctctgggtctttttttgggccagcccttttttgacattgcttccagcagtggaaaatgggcatttgatggcaataggccaaaattattgtgtccagagagtacactttttcaaaatgctcacctactggaagtgtgaattacttgacaatgtatggcttagttgtgttcatgttttgtctacagtagaggtctaatccacaggttacacctatgtttgatatgatataagttctctttgcgtaggccactgggtttctcatgcagtaagctttataaaaactcatttgcactggactgtcatctcattcttgtacaacgtagaattacttgtttacatccaacaaatggttagctagggaaaacagtgcaaactgagtgttagtagtcattttggtccaactgcatgtcaacccttccatttcaatcccagttagaaatgaaaataattactttgaaacttggctttaagagcacatttatcgtacgtcacagtgtatggtgaatatattattaaataatgtggtacttcgctcatcaggcataatgtctaaaatctaatatacataattccattaagtggttgaaggaagcaaataatggaattgtcaattggtcatctggctgtaaggtttgcccttgaactaaaaatgttgtttggggcaagggccagaaatgtggagacatggtttttgttacgcattcttgtattatatgtgactaaatttacaaacaagatacatgtgtaattaaagacccttatggaactggaagacgtcttgtagtgctacattgggtgaaaccgttggtccatttttgtcctgtttctatgaagataaaataattgggggccatctagaaatagaaaggcagtgggaagacagattctacggcactgctttcatttaattgggctttaggcactccattcgaatgcagaacctcacctctagttgagaccaagaattggcaaatttgcatgagctcctggaaagagttgctgactttgtatctaagacctgccagggaataccaagagttgtttctacagactttttttttttttttgtatgggagaagatactgtggcaaccaggaaggaatggaaaaaaaattcttttctctacagcaaattaatgtgaggaagctcctccaatcctctggctatttaaggttcaaaatcaagtgcctagggaaaattccaatggatgattttctgggagctatcttgtctaccttgaggttcctgaacaatgaattcccattaatgagcagtcttcagtattaaaaccactgtcttgtcacctcattttgcattactgtcttccgtggatgtttcagttacaactgtaatgttatttatagaacaacattaatccattaaagctaacctatttttcaatatttatgataatctatgtacatatattgtctgtccatatgtatttgtaaataggttgtatataatgtcaggtttgggtcttgggttcaagtgtatatattcctgtaagtttcttaactgcattttgatgaattcacattatgtaactataagaattgtcccaaaagtacctgtacagaaaattgaatattgaaaaattgacaaattgtgtacaaacactaaaaaaaacttgtttaaattgtatttgcaataaacaacatcaaattttttcatgaaatcttggtacaaattcagatctcttatttaaaatttaaataaggaatacattttcaaaatgcagtaatcaaaatgtgatctagtgtaatgaaataaaatgtgatctagtgtaatggaagacctttgagaacctgggtgtattaactttgtgtatatagtgtaaatatccccactgtactgttagaggccaacaattctagtatggcttgttggcaaagagtgctacaccgtttcaatgaaacaatgtatgtttgttttaactgaactaaaataaatacatgcttaatcctg

SEQ ID NO: 165 - DNA, 4795 bp, Homo sapiens; identical to SEQ ID NO: 164

SEQ ID NO: 166 - DNA, 4811 bp, Homo sapiens
ctcagccgcgcgacgccgccgccttagaacgcctttccagtactgctagcagcagcccgaccacgcgttaccgcacgctcgcgcctttcccttgacacggcggacgccggaggattggggcggcaatttgtcttttccttttttattaaaattatttttcctgcctgttgttggatttggggaaattttttgtttgttttttatgatttgtatttgactgagagaaacccactgaagacgtctgcgtgagaatagagaccaccgaggccgactcgcgggccgctgcacccaccgccaaggacaaaaggagtccagcgctactagctgcacccgattcctcccagtgcttagcatgaagaaggccgaaatgggacgattcagtatttccccggatgaagacagcagcagctacagttccaacagcgacttcaactactcctaccccaccaagcaagctgctctgaaaagccattatgcagatgtagatcctgaaaaccagaactttttacttgaatcgaatttggggaagaagaagtatgaaacagaatttcatccaggtactacttcctttggaatgtcagtatttaatctgagcaatgcgattgtgggcagtggaatccttgggctttcttatgccatggctaatactggaattgctctttttataattctcttgacatttgtgtcaatattttccctgtattctgttcatctccttttgaagactgccaatgaaggagggtctttattatatgaacaattgggatataaggcatttggattagttggaaagcttgcagcatctggatcaattacagtgcagaacattggagctatgtcaagctacctattcatagtgaaatatgagttgcctttggtgatccaggcattaacgaacattgaagataaaactggattgtggtatctgaacgggaactatttggttctgttggtgtcattggtggtcattcttcctttgtcgctgtttagaaatttaggatatttgggatataccagtggcctttccttgttgtgtatggtgttctttctgattgtggtcatttgcaagaaatttcaggttccgtgtcctgtggaagctgctttgataattaacgaaacaataaacaccaccttaacacagccaacagctcttgtacctgctttgtcacataacgtgactgaaaatgactcttgcagacctcactattttattttcaactcacagactgtctatgctgtgccaattctgatcttttcatttgtctgtcatcctgctgttcttcccatctatgaagaactgaaagaccgcagccgtagaagaatgatgaatgtgtccaagatttcattttttgctatgtttctcatgtatctgcttgccgccctctttggatacctaacattttacgaacatgttgagtcagaattgcttcatacctactcttctatcttgggaactgatattcttcttctcattgtccgtctggctgtgttaatggctgtgaccctgacagtaccagtagttattttcccaatccggagttctgtaactcacttgttgtgtgcatcaaaagatttcagttggtggcgtcatagtctcattacagtgtctatcttggcatttaccaatttacttgtcatctttgtcccaactattagggatatctttggttttattggtgcatctgcagcttctatgttgatttttattcttccttctgccttctatatcaagttggtgaagaaagaacctatgaaatctgtacaaaagattggggctttgttcttcctgttaagtggtgtactggtgatgaccggaagcatggccttgattgttttggattgggtacacaatgcacctggaggtggccattaattggcaccactcaaactcaaactcagtccatctgatgccagttttgagtaaactcaactactatgaaatttcacctaatgttttcagtttcacttccttttgaagtgcagattcctcgctggttcttctgagtgcagaataagtgaacttttttgttttgttttgtttttttaagaaacttatctgtatgttagaaatggatatgaacaacaaaaccacgagtctcgggttaagggaagtgacaattttattccattccagagaatggacaaactctttaacttttatcaagccacatgcttggctgtgtcattgtttaacttggatattttatgattttacttgaatgtgcctaatggaaccatttgatgtgagaaacaattctttttaatttacagcaaaatattgaataaccattgacaaaaacactattattttttgtaccaaaaatacttaaagacctcagaagcactcttttacttttaagaaattgcttttttgaactttattcagaagcagttatcaataaattccataaaataatgtcattggtatttaaaaatgaatattaatataatgaaatgggtttgcctttttgtaggcataataagccaaatacttttttacccaaaataatttttagagaaaatgatgtaatgaaaaattgtaccatgaattagggagcatagttttttccatttaaacgtcaccattacttaaaagatgattgattattgctataccaaatcagatgaactctgttcatcacttttcttctctgtccccaaacaatttggttcattcagactgaaatgtttgtgtcttcaacttattagaatggaagataatgcagatatttctgtgggaaataaaataactaattttgaggtaccaaatagtgcaattgggtaaaacagggtttattcagttgcatctgtctccagtgttgtattgacagctctgggtctttttttgggccagcccttttttgacattgcttccagcagtggaaaatgggcatttgatggcaataggccaaaattattgtgtccagagagtacactttttcaaaatgctcacctactggaagtgtgaattacttgacaatgtatggcttagttgtgttcatgttttgtctacagtagaggtctaatccacaggttacacctatgtttgatatgatataagttctctttgcgtaggccactgggtttctcatgcagtaagctttataaaaactcatttgcactgggactgtcatctcattcttgtacaacgtagaattacttgtttacatccaacaaatgggttagctagggaaaacagtgcaaactgagtgttagtagtcattttggtccaactgcatgtcaacccttccatttcaatcccagttagaaatgaaaataattactttgaaacttggctttaagagcacatttatcgtacgtcacagtgtatggtgaatatattattaaataatgtggtacttcgctcatcaggcataatgtctaaaatctaatatacaataattccattaagtggttgaaggaagcaaataatggaattgtcaattggtcatctggctgtaaggtttgcccttgaactaaaaatgttgtttggggcaagggccagaaatgtggagacatggtttttgttacgcattcttgtattatatgtgactaaatttacaaacaagatacatgtgtaattaaagacccttatggaactggaagacgtcttgtagtgctacattgggtgaaaccgttggtccatttttgtctgtttctatgaagataaaataattgggggccatctagaaatagaaaggcagtgggaagacagattctacggcactgctttcatttaattgggctttaggcactccattcgaatgcagaacctcacctctagttgagaccaagaattggcaaatttgcatgagctcctggaaagagttgctgactttgtatctaagacctgccagggaataccaagagttgtttctacagactttttttttttttttgtatgggagaagatactgtgggaaccaggaaggaatggaaaaaaaattcttttctctacagcaaattaatgtgaggaagctcctccaatcctctggctatttaaggttcaaaatcaagtgcctagggaaaattccaatggatgattttctgggagctatcttgtctaccttgaggttcctgaacaatgaattcccattaatgagcagtcttcagtattaaaaccactgtcttgtcacctcattttgcattactgtcttccgtggatgtttcagttacaactgtaatgttatttatagaacaacattaatccattaaagctaacctatttttcaatatttatgataatctatgtacatatattgtctgtccatatgtatttgtaaataggttgtatataatgtcaggtttgggtcttgggttcaagtgtatatattcctgtaagtttcttaactgcattttgatgaattcacattatgtaactataagaattgtcccaaaagtacctgtacagaaaattgaatattgaaaaattgacaaattgtgtacaaacactaaaaaaaacttgtttaaattgtatttgcaataaacaacaatcaaattttttcatgaaatcttggtacaaattcagatctcttatttaaaatttaaataaggaatacattttcaaaatgcagtaatcaaaatgtgatctagtgtaatgaaataaaatgtgatctagtgtaatggaagacctttgagaacctgggtgtattaactttgtgtatatagtgtaaatatccccactgtactgttagaggccaacaattctagtatggcttgttggcaaagagtgctacaccgtttcaatgaaacaatgtatgtttgttttaactgaactaaaataaatacatgcttaatcctgaaaaaaaaaa

SEQ ID NO: 167 - DNA, 1381 bp, Homo sapiens
catctggctgtaaggtttgcccttgaactaaaaatgttgtttggggcaagggccagaaatgtggagacatggtttttgttacgcattcttgtattatatgtgactaaatttacaaacaagatacatgtgtaattaaagacccttatggaactggaagacgtcttgtagtgctacattgggtgaaaccgttggtccatttttgtctgtttctatgaagataaaataattgggggccatctagaaatagaaaggcagtgggaagacagattctacggcactgctttcatttaattgggctttaggcactccattcgaatgcagaacctcacctctagttgagaccaagaattggcaaatttgcatgagctcctggaaagagttgctgactttgtatctaagacctgccagggaataccaagagttgtttctacagacttttttttttttttttgtatgggagaagatactgtggcaaccaggaaggaatggaaaaaaaattcttttctctacagcaaattaatgtgaggaagctcctccaatcctctggctatttaaggttcaaaatcaagtgcctagggaaaattccaatggatgattttctgggagctatcttgtctaccttgaggttcctgaacaatgaattcccattaatgagcagtcttcagtattaaaaccactgtcttgtcacctcattttgcattactgtcttccgtggatgtttcagttacaactgtaatgttatttatagaacaacattaatccattaaagctaacctatttttcaatatttatgataatctatgtacatatattgtctgtccatatgtatttgtaaataggttgtatataatgtcaggtttgggtcttgggttcaagtgtatatattcctgtaagtttcttaactgcattttgatgaattcacattatgtaactataagaattgtcccaaaagtacctgtacagaaaattgaatattgaaaaattgacaaattgtgtacaaacactaaaaaaaacttgtttaaattgtatttgcaataaacaacatcaaattttttcatgaaatcttggtacaaattcagatctcttatttaaaatttaaataaggaatacattttcaaaatgcagtaatcaaaatgtgatctagtgtaatgaaataaaatgtgatctagtgtaatggaagacctttgagaacctgggtgtattaactttgtgtatatagtgtaaatatccccactgtactgttagaggccaacaattctagtatggcttgttggcaaagagtgctacaccgtttcaatgaaacaatgtatgtttgttttaactgaactaaaataaatacatgcttaatcccgaaaaaaaaaaaaacaaaaaaaaaaaaaaa

SEQ ID NO: 168 - DNA, 1450 bp, Homo sapiens
gctttttttttttttttttttttttgagttttaaaattctttatttaaaaatctctaactgtaatgtttcataaaaaatatacacgtttctatttacatattccattaattctattagtttgaattagattttaagtccaattttgaaaagcttgcagaatttcttctgaaattacttaaaattactgtatgcataaacttacaaaaacatatgctataccaaggcagagaaaagaaaaaaagtgaagtggctacaaaggtccctggggcatcacctgctcacctaggaaccaggagtactggatactgttccgttactggtaacctatctggatgtaaaggttcataagttacaatgctttttttgtttaaaaaaaaaaaaagtctgtactttacaagccaaaagtgaaaatgccacacatcctctttacgctttcatgtacactaagtcactccatttggttgataccaactaagatacaatttctgagatcataatcttttcatgaaattaaagcagaaaactgtccaggaaaatcagacttcaaagttggtgcaacttagctgatctcatgaaaattcttttctctacagcaaattaatgtgaggaagctcctccaatcctctggctatttaaggttcaaaatcaagtgcctagggaaaattccaatggatgattttctgggagctatcttgtctaccttgaggttcctgaacaatgaattcccattaatgagcagtcttcagtattaaaaccactgtcttgtcacctcattttgcattactgtcttccgtggatgtttcagttacaactgtaatgttatttatagaacaacattaatccattaaagctaacctatttttcaatatttatgataatctatgtacatatattgtctgtccatatgtatttgtaaataggttgtatataatgtcaggtttgggtcttgggttcaagtgtatatattcctgtaagtttcttaactgcattttgatgaattcacattatgtaactataagaattgtcccaaaagtacctgtacagaaaattgaatattgaaaaattgacaaattgtgtacaaacactaaaaaaaacttgtttaaattgtatttgcaataaacaacatcaaattttttcatgaaatcttggtacaaattcagatctcttatttaaaatttaaataaggaatacattttcaaaatgcagtaatcaaaatgtgatctagtgtaatgaaataaaatgtgatctagtgtaatggaagacctttgagaacctgggtgtattaactttgtgtatatagtgtaaatatccccactgtactgttagaggccaacaattctagtatggcttgttggcaaagagtgctacaccgtttcaatgaaacaatgtatgtttgttttaactgaactaaaataaatacatgcttaatcctgaaaaaaaaaaaaaaaa

SEQ ID NO: 169 - DNA, 2270 bp, Homo sapiens
tctcaaaggtcttccattacactagatcacattttatttcattacactagatcacattttgattactgcattttgaaaatgtattccttatttaaattttaaataagagatctgaatttgtaccaagatttcatgaaaaaatttgatgttgtttattgcaaatacaatttaaacaagttttttttagtgtttgtacacaatttgtcaatttttcaatattcaattttctgtacaggtacttttgggacaattcttatagttacataatgtgaattcatcaaaatgcagttaagaaacttacaggaatatatacacttgaacccaagacccaaacctgacattatatacaacctatttacaaatacatatggacagacaatatatgtacatagattatcataaatattgaaaaataggttagctttaatggattaatgttgttctataaataacattacagttgtaactgaaacatccacggaagacagtaatgcaaaatgaggtgacaagacagtggttttaatactgaagactgctcattaatgggaattcattgttcaggaacctcaaggtagacaagatagctcccagaaaatcatccattggaattttccctaggcacttgattttgaaccttaaatagccagaggattggaggagcttcctcacattaatttgctgtagagaaaagaattttttttccattccttcctggttgccacagtatcttctcccatacaaaaaaaaaaaaaaagtctgtagaaacaactcttggtattccctggcaggtcttagatacaaagtcagcaactctttccaggagctcatgcaaatttgccaattcttggtctcaactagaggtgaggttctgcattcgaatggagtgcctaaagcccaattaaatgaaagcagtgccgtagaatctgtcttcccactgcctttctatttctagatggcccccaattattttatcttcatagaaacagacaaaaatggaccaacggtttcacccaatgtagcactacaagacgtcttccagttccataagggtctttaattacacatgtatcttgtttgtaaatttagtcacatataatacaagaatgcgtaacaaaaaccatgtctccacatttctggcccttgccccaaacaacatttttagttcaagggcaaaccttacagccagatgaccaattgacaattccattatttgcttccttcaaccacttaatggaattatgtatattagattttagacattatgcctgatgagcgaagtaccacattatttaataatatattcaccatacactgtgacgtacgataaatgtgctcttaaagccaagtttcaaagtaattattttcatttctaactgggattgaaatggaagggttgacatgcagttggaccaaaatgactactaacactcagtttgcactgttttccctagctaaccatttgttggatgtaaacaagtaattctacgttgtacaagaatgagatgacagtccagtgcaaatgagtttttataaagcttactgcatgagaaacccagtggcctacgcaaagagaacttatatcatatcaaacataggtgtaacctgtggattagacctctactgtagacaaaacatgaacacaactaagccatacattgtcaagtaattcacacttccagtaggtgagcattttgaaaaagtgtactctctggacacaataattttggcctattgccatcaaatgcccattttccactgctggaagcaatgtcaaaaaagggctggcccaaaaaaagacccagagctgtcaatacaacactggagacagatgcaactgaataaaccctgttttacccaattgcactatttggtacctcaaaattagttattttatttcccacagaaatatctgcattatcttccattctaataagttgaagacacaaacatttcagtctgaatgaaccaaattgtttggggacagagaagaaaagtgatgaacagagttcatctgatttggtatagcaataatcaatcatcttttaagtaatggtgacgtttaaatggaaaaaactatgctcctaattcatggtacaatttttcattacatcattttctctaaaaattattttgggtaaaaaagtatttggcttattatgcctacaaaaaggcaaaccatttcattatattaatattcatttttaaataccaatgacattattttatggaatttattgataactgcttctgaataaagttcaaaaaaaaaa

SEQ ID NO: 170 - DNA, 2231 bp, Homo sapiens
caccattacttaaaagatgattgattattgctataccaaatcagatgaactctgttcatcacttttcttctctgtccccaaacaatttggttcattcagactgaaatgtttgtgtcttcaacttattagaatggaagataatgcagatatttctgtgggaaataaaataactaattttgaggtaccaaatagtgcaattgggtaaaacagggtttattcagttgcatctgtctccagtgttgtattgacagctctgggtctttttttgggccagcccttttttgacattgcttccagcagtggaaaatgggcatttgatggcaataggccaaaattattgtgtccagagagtacactttttcaaaatgctcacctactggaagtgtgaattacttgacaatgtatggcttagttgtgttcatgttttgtctacagtagaggtctaatccacaggttacacctatgtttgatatgatataagttctctttgcgtaggccactgggtttctcatgcagtaagctttataaaaactcatttgcactggactgtcatctcattcttgtacaacgtagaattacttgtttacatccaacaaatggttagctagggaaaacagtgcaaactgagtgttagtagtcattttggtccaactgcatgtcaacccttccatttcaatcccagttagaaatgaaaataattactttgaaacttggctttaagagcacatttatcgtacgtcacagtgtatggtgaatatattattaaataatgtggtacttcgctcatcaggcataatgtctaaaatctaatatacataattccattaagtggttgaaggaagcaaataatggaattgtcaattggtcatctggctgtaaggtttgcccttgaactaaaaatgttgtttggggcaagggccagaaatgtggagacatggtttttgttacgcattcttgtattatatgtgactaaatttacaaacaagatacatgtgtaattaaagacccttatggaactggaagacgtcttgtagtgctacattgggtgaaaccgttggtccatttttgtctgtttctatgaagataaaataattgggggccatctagaaatagaaaggcagtgggaagacagattctacggcactgctttcatttaattgggctttaggcactccattcgaatgcagaacctcacctctagttgagaccaagaattggcaaatttgcatgagctcctggaaagagttgctgactttgtatctaagacctgccagggaataccaagagttgtttctacagacttttttttttttttgtatgggagaagatactgtggcaaccaggaaggaatggaaaaaaaattcttttctctacagcaaattaatgtgaggaagctcctccaatcctctggctatttaaggttcaaaatcaagtgcctagggaaaattccaatggatgattttctgggagctatcttgtctaccttgaggttcctgaacaatgaattcccattaatgagcagtcttcagtattaaaaccactgtcttgtcacctcattttgcattactgtcttccgtggatgtttcagttacaactgtaatgttatttatagaacaacattaatccattaaagctaacctatttttcaatatttatgataatctatgtacatatattgtctgtccatatgtatttgtaaataggttgtatataatgtcaggtttgggtcttgggttcaagtgtatatattcctgtaagtttcttaactgcattttgatgaattcacattatgtaactataagaattgtcccaaaagtacctgtacagaaaattgaatattgaaaaattgacaaattgtgtacaaacactaaaaaaaacttgtttaaattgtatttgcaataaacaacatcaaattttttcatgaaatcttggtacaaattcagatctcttatttaaaatttaaataaggaatacattttcaaaatgcagtaatcaaaatgtgatctagtgtaatgaaataaaatgtgatctagtgtaatggaagacctttgagaacctgggtgtattaactttgtgtatatagtgtaaatatccccactgtactgttagaggccaacaattctagtatggcttgttggcaaagagtgctacaccgtttcaatgaaacaatgtatgtttgttttaactgaactaaaataaatacatgcttaatcctgaaaaaaaaaaaaaaa

SEQ ID NO: 171 - DNA, 3362 bp, Homo sapiens
gggtgggtagaggtgcgcgcctgggacctgaacatggacttcccgtgcctctggctagggctgttgctgcctttggtagctgcgctggatttcaactaccaccgccaggaagggatggaagcgtttttgaagactgttgcccaaaactacagttctgtcactcacttacacagtattgggaaatctgtgaaaggtagaaacctgtgggttcttgttgtggggcggtttccaaaggaacacagaattgggattccagagttcaaatacgtggcaaatatgcatggagatgagactgttgggcgggagctgctgctccatctgattgactatctcgtaaccagtgatggcaaagaccctgaaatcacaaatctgatcaatagtacccggatacacatcatgccttccatgaacccagatggatttgaagccgtcaaaaagcctgactgttactacagcatcggaagggaaaattataaccagtatgacttgaatcgaaatttccccgatgcttttgaatataataatgtctcaaggcagcctgaaactgtggcagtcatgaagtggctgaaaacagagacgtttgtcctctctgcaaacctccatggtggtgccctcgtggccagttacccatttgataatggtgttcaagcaactggggcattatactcccgaagcttaacgcctgatgatgatgtttttcaatatcttgcacatacctatgcttcaagaaatcccaacatgaagaaaggagacgagtgtaaaaacaaaatgaactttcctaatggtgttacaaatggatactcttggtatccactccaaggtggaatgcaagattacaactacatctgggcccagtgttttgaaattacgttggagctgtcatgctgtaaatatcctcgtgaggagaagcttccatccttttggaataataacaaagcctcattaattgaatatataaagcaggtgcacctaggtgtaaagggtcaagtttttgatcagaatggaaatccattacccaatgtaattgtggaagtccaagacagaaaacatatctgcccctatagaaccaacaaatatggagagtattatctccttctcttgcctgggtcttatattataaatgttacagtccctggacatgatccacacatcacaaaggtgattattccggagaaatcccagaacttcagtgctcttaaaaaggatattctacttccattccaagggcaattggattctatcccagtatcaaatccttcatgcccaatgattcctctatacagaaatttgccagaccactcagctgcaacaaagcctagtttgttcttatttttagtgagtcttttgcacatattcttcaaataaagtaaaatgtgaaactcaacccacatcaccacctggaatcagggattgctcactccaggttactgcaaccctaactcactctagtgggaccttgactggagaaactccacgatcttcctgaagaagagaaatggatgtttccaaattccacaataagcaatatgtggtgataatgaaaagaatgattcagtcttgacggtgaatggaagacacttacctaacaagtactgctcatttacactcaaattaatcttgaagtagtcttaaaatgtgtaagaagttaaaacttgagaagcaaaaaaatgcctgcaaaaagaagatcattttgtatacagagaaccggatgaatataagcaatgaagatgaacatttattgatcttctacatacaagacttcaccataaggccaggagcagtggctcacaccttgtaatcccagcactttgggaggccaaggtgggcggatcaccttgaggtcaggagttcaagaccagcctgaccaacatggtgaaaccctgtctctactaaatattagcggggtgtggtggcgggcacctgtagtcgcagcctttcgggaggctgagacaggagaatcgcttgaaccctagaggcggagtttgcagtgagccgagatagtgccattgtactccagcttgggcaacagagtaagactctgtctcaaaaaaaaaaaaacaaaaacaaacaaacaaaaaaaacacctcaccatgagtgctacatgtgaatagatattaagtgccatatataattagttctcagaagaagggagaaatgatcataggactgggaattgttttgcaaacgttctaggagatgtgagagaaaatatgtaaccacatcttagtggcccaagaaaatacaggcctgaagggataagattgtgtctctatagagcttcaaagcatacaggtcaattaagaaagcccctctctctccagagccgtttccctagcttttggcacctggatgccacagtcctccattaggctgatgactccaaagatgtaactctagcctcttgcctgagcttcagactcgcgtcccactgcccacaggacacatccacctggatgtgactcacaggtacctccaacccatcatgtggagatactcatcctgttccccctagagctgctcttcctgctgcattctctctctcaattactgggaccaccaagctaggaacctgggagtcatccttgatactttctcttcctccttaatcctgtgtattcagcaagtaactaaaggttggtgttggccaggcatggtggctcatgcctgtaatcccagcattttgggaggccaaggcgggcggatcacttgaggtcaggagctcaagaccagcctggccaacatggtgaaaccccatctctactaaaaaaaaaaaaaaaattagtcgggcgtggtggtgcatgcctgtaatcccagctactggggaggctgaggcaggagaatcgcttgaacctgggaggcagaggttgcagtgagccgggattgcgccattgtactccagcctgggtgaagaagtgagactctgtcttaaaaaaaaaaattggtgctgataaatattgatgaattctgctctctgctctctatggttgtcaacactgcagagttgaggcctcatatctcacctgcactgctgcaacagcttactggtcccttgctcccagccttctcctcttcagtccatcgtccacacagcactggggaaggggagccacttgaaacaaaagtcaacaactggttgtagttcataaacacagagctgtttgtgtcccctgtatctggattgccattatgacccactacattttttcttttcctacccctctaaaaactcagttcaggtagcagctccactaggaagccttggctgaccataatcccattcaattccatttcacctcttcgcaggcagtctggggttagggaccctttctctttgctccccaaaataaactggttatctctac

SEQ ID NO: 172 - DNA, 2085 bp, Homo sapiens
gcatttcttccttctgcgtatgggacaggaccctttctggaatgggggtcttatgacctacaatcaaacaagaacatggacttcccgtgcctctggctagggctgttgctgcctttggtagctgcgctggatttcaactaccaccgccaggaagggatggaagcgtttttgaagactgttgcccaaaactacagttctgtcactcacttacacagtattgggaaatctgtgaaaggtagaaacctgtgggttcttgttgtggggcggtttccaaaggaacacagaattgggattccagagttcaaatacgtggcaaatatgcatggagatgagactgttgggcgggagctgctgctccatctgattgactatctcgtaaccagtgatggcaaagaccctgaaatcacaaatctgatcaatagtacccggatacacatcatgccttccatgaacccagatggatttgaagccgtcaaaaagcctgactgttactacagcatcggaagggaaaattataaccagtatgacttgaatcgaaatttccccgatgcttttgaatataataatgtctcaaggcagcctgaaactgtggcagtcatgaagtggctgaaaacagagacgtttgtcctctctgcaaacctccatggtggtgccctcgtggccagttacccatttgataatggtgttcaagcaactggggcattatactcccgaagcttaacgcctgatgatgatgtttttcaatatcttgcacatacctatgcttcaagaaatcccaacatgaagaaaggagacgagtgtaaaaacaaaatgaactttcctaatggtgttacaaatggatactcttggtatccactccaaggtggaatgcaagattacaactacatctgggcccagtgttttgaaattacgttggagctgtcatgctgtaaatatcctcgtgaggagaagcttccatccttttggaataataacaaagcctcattaattgaatatataaagcaggtgcacctaggtgtaaagggtcaagtttttgatcagaatggaaatccattacccaatgtaattgtggaagtccaagacagaaaacatatctgcccctatagaaccaacaaatatggagagtattatctccttctcttgcctgggtcttatattataaatgttacagtccctggacatgatccacacatcacaaaggtgattattccggagaaatcccagaacttcagtgctcttaaaaaggatattctacttccattccaagggcaattggattctatcccagtatcaaatccttcatgcccaatgattcctctatacagaaatttgccagaccactcagctgcaacaaagcctagtttgttcttatttttagtgagtcttttgcacatattcttcaaataaagtaaaatgtgaaactcaacccacatcaccacctggaatcagggattgctcactccaggttactgcaaccctaactcactctagtgggaccttgactggagaaactccacgatcttcctgaagaagagaaatggatgtttccaaattccacaataagcaatatgtggtgataatgaaaagaatgattcagtcttgacggtgaatggaagacacttacctaacaagtactgctcatttacactcaaattaatcttgaagtagtcttaaaatgtgtaagaagttaaaacttgagaagcaaaaaatgcctgcaaaaagaagatcattttgtatacagagaaccggatgaatataagcaatgaagatgaacatttattgatcttctacatacaagacttcaccataaggccaggagcagtgctcacgccttgtaatcccagcactttgggaggccaaggtgggcggatcaccttgaggtcaggagttcaagaccagcctgaccaacatggtgaaaccctgtctctactaaatattagcggggtgtggtggcgggcacctgtagtcgcagcctttcgggaggctgagacaggagaatcgcttgaaccctagaggcggagtttgcagtgagccgagatagtgccattgtactccagcttgggcaacagagtaagactctgtctc

SEQ ID NO: 173 - DNA, 2075 bp, Homo sapiens
gggtgggtagaggtgcgcgcctgggacctgaacatggacttcccgtgcctctggctagggctgttgctgcctttggtagctgcgctggatttcaactaccaccgccaggaagggatggaagcgtttttgaagactgttgcccaaaactacagttctgtcactcacttacacagtattgggaaatctgtgaaaggtagaaacctgtgggttcttgttgtggggcggtttccaaaggaacacagaattgggattccagagttcaaatacgtggcaaatatgcatggagatgagactgttgggcgggagctgctgctccatctgattgactatctcgtaaccagtgatggcaaagaccctgaaatcacaaatctgatcaatagtacccggatacacatcatgccttccatgaacccagatggatttgaagccgtcaaaaagcctgactgttactacagcatcggaagggaaaattataaccagtatgacttgaatcgaaatttccccgatgcttttgaatataataatgtctcaaggcagcctgaaactgtggcagtcatgaagtggctgaaaacagagacgtttgtcctctctgcaaacctccatggtggtgccctcgtggccagttacccatttgataatggtgttcaagcaactggggcattatactcccgaagcttaacgcctgatgatgatgtttttcaatatcttgcacatacctatgcttcaagaaatcccaacatgaagaaaggagacgagtgtaaaaacaaaatgaactttcctaatggtgttacaaatggatactcttggtatccactccaaggtggaatgcaagattacaactacatctgggcccagtgttttgaaattacgttggagctgtcatgctgtaaatatcctcgtgaggagaagcttccatccttttggaataataacaaagcctcattaattgaatatataaagcaggtgcacctaggtgtaaagggtcaagtttttgatcagaatggaaatccattacccaatgtaattgtggaagtccaagacagaaaacatatctgcccctatagaaccaacaaatatggagagtattatctccttctcttgcctgggtcttatataataaatgttacagtccctggacatgatccacacatcacaaaggtgattattccggagaaatcccagaacttcagtgctcttaaaaaggatattctacttccattccaagggcaattggattctatcccagtatcaaatccttcatgcccaatgattcctctatacagaaatttgccagaccactcagctgcaacaaagcctagtttgttcttatttttagtgagtcttttgcacatattcttcaaataaagtaaaatgtgaaactcaacccacatcaccacctggaatcagggattgctcactccaggttactgcaaccctaactcactctagtgggaccttgactggagaaactccacgatcttcctgaagaagagaaatggatgtttccaaattccacaataagcaatatgtggtgataatgaaaagaatgattcagtcttgacggtgaatggaagacacttacctaacaagtactgctcatttacactcaaattaatcttgaagtagtcttaaaatgtgtaagaagttaaaacttgagaagcaaaaaaatgcctgcaaaaagaagatcattttgtatacagagaaccggatgaatataagcaatgaagatgaacatttattgatcttctacatacaagacttcaccataaggccaggagcagtggctcacaccttgtaatcccagcactttgggaggccaaggtgggcggatcaccttgaggtcaggagttcaaaaccagcctgaccaacatggtgaaaccctgtctctactaaatattagcggggtgtggtggcgggcacctgtaatcgcagcctttcaggaggctgagacaggagaatcgcttgaaccctagaggcggagtttgcagtgagccgagatagtgccattgtactccagcttgggcaacagagtaagactctgtctcaaaaaaaaaaaaaaaaaaaaaaaaaaaaaa

SEQ ID NO: 174 - DNA, 1384 bp, Homo sapiens
gggctagagagtcattctcctttctgtaatttgcattctgcactaaacacttctctgatatagccattttagtcattattctggagacatttcccataaatactatctgctaaccacatacctccgatatctatggcagtgattttttttttttgagatggagtctcgctctgtcaccaggctggagtggagtggcacaatctcagctcactgcaacctccgtcacctgggttcaagcaattctcctgcctcagcctcccaagtacctgggactacaggtgcacaccaccacgtccagctaatttttgtatttttagtagagacggggtttcaccatgttggccaggatggtctcgatctcttgacctcatgatcctccccccatcagcctcccaaagtgctaggattacaggcatgagccaccttgcccagccatgatttttagtctcttcgatcatggactcctttggaaacctgccttagaaaaatgctcagatatacatatattcatatgcaatttcaggagagtgactcagtgagtgactgtgtctagcaaaagaactgtaatccaggtagattaaatcacagttacactatgcctgctaaggaaagaggaaatagcaccaagcacttgcattcccatgcggcctgacgttgacagttttatgcgtattctctaagttcaacctctgcctcatctatactactagtaatatgtatgcatcctgcattgctgtaatgttaatattactgtgcacttttttcctgtttgtactaactctgtaattttttcctgtttttacttactctgtaatttatcctgtaggaactgtacttaagaattgagaggggttttagttttaactaatgccgttgggattattagtggtatttatcctaaccttcagactctacctctcagcccatttgctttatttcttttctttttttctttttcttttttttttttttttttttttgagacagagccttgctctgtcacccaggctggagtgcaatagcacgatcttggctcaccacaacttctgtcttccaagttcaagcaattcttttgcctcagcctcccgagtagctggggctacaggcacgcaccaccacgcctggctaatttttgtattttcagtagagacagggtttcatcatgttggccaggtgggtcttgaactcctgacctcaagcgatccacctgcctcggcctcccaaagtgctgggattacagatgggagccactgtgcccagcctatttctaaataagaatttacttgggttctattaatagtttttaaaattaacaaaagcaacaacaaatccaacctaaatgtttgacttttaccaaaaaaaaaaaaaaaaaaaaaaaaaaaaa

SEQ ID NO: 175 - DNA, 2085 bp, Homo sapiens; identical to SEQ ID NO: 172

SEQ ID NO: 176 - DNA, 1891 bp, Homo sapiens
agcacctgggaaaaggcagaccgtgtgagggggcctgtggccccagcgtgctgtggcctcggggagtgggaagtggaggcaggagccttccttacacttcgccatgagtttcctgatcgactccagcatcatgattacctcccaaatactattttttggatttgggtggcttttcttcatgcgccaattgtttaaagactatgagatacgtcagtatgttgtacaggtgatcttctccgtgacgtttgcattttcttgcaccatgtttgagctcatcatctttgaaatcttaggagtattgaatagcagctcccgttattttcactggaaaatgaacctgtgcgtaattctgctgatcctggttttcatggtgcctttttacattggctattttattgtgagcaatatccgactactgcataaacaacgactgcttttttcctgtctcttatggctgacctttatgtatttcttctggaaactaggagatccctttcccattctcagcccaaaacatgggatcttatccatagaacagctcatcagccgggttggtgtgattggagtgactctcatggctcttctttctggatttggtgctgtcaactgcccatacacttacatgtcttacttcctcaggaatgtgactgacacagatattctagccctggaacggcgactgctgcaaaccatggatatgatcataagcaaaaagaaaaggatggcaatggcacggagaacaatgttccagaagggggaagtgcataacaaaccatcaggtttctggggaatgataaaaagtgttaccacttcagcatcaggaagtgaaaatcttactcttattcaacaggaagtggatgctttggaagaattaagcaggcagctttttctggaaacagctgatctatatgctaccaaggagagaatagaatactccaaaaccttcaaggggaaatattttaattttcttggttactttttctctatttactgtgtttggaaaattttcatggctaccatcaatattgtttttgatcgagttgggaaaacggatcctgtcacaagaggcattgagatcactgtgaattatctgggaatccaatttgatgtgaagttttggtcccaacacatttccttcattcttgttggaataatcatcgtcacatccatcagaggattgctgatcactcttaccaagttcttttatgccatctctagcagtaagtcctccaatgtcattgtcctgctattagcacagataatgggcatgtactttgtctcctctgtgctgctgatccgaatgagtatgcctttagaataccgcaccataatcactgaagtccttggagaactgcagttcaacttctatcaccgttggtttgatgtgatcttcctggtcagcgctctctctagcatactcttcctctatttggctcacaaacaggcaccagagaagcaaatggcaccttgaacttaagcctactacagactgttagaggccagtggtttcaaaatttagatataagaggggggaaaaatggaaccagggcctgacattttataaacaaacaaaatgctatggtagcatttttcaccttcatagcatactccttccccctcaggtgatactatgaccatgagtagcatcagccagaacatgagagggagaactaactcaagacaatactcagcagagagcatcccgtgtggatatgaggctggtgtagaggcggagaggagccaagaaactaaaggtgaaaaatacactggaactctggggcaagacatgtctatggtagctgagccaaacacgtaggatttccgttttaaggttcacatggaaaaggttatagctttgccttgagattgactcattaaaatcagagactgt

SEQ ID NO: 177 - DNA, 2700 bp, Homo sapiens
ggtccaaactcctaagagctaggcttcggaaataccatgtgtacagtcatctttccagcacctgcacaatatcataaaatcattgtctttgagctgaagtggtcctaaaaagtcagcctttccattttacagatgagaaaatagacccagagaggttaagtcacacggtggtttgtggcaaagctagaaacataactgtggtctcctcttcatagttctttccactacactattacatttctcaactctgaaaaaccaccataaagcataatggctacctaaaataaatggcccatttctaaagtaattagtattcctaaacaaattttaagtagctctgcttctccagtgacattttggtttaaagaatcaaggggaggctgggtgcagtggctcatccctgtaatcccagcactttgcaaggccgaggtgggcagatcacttgaacccaggagttcaagacaagcctcggcaacatgacaaaacctcatctctacaaaaaatacaaaaattagccaggcccagtggcatgtgcctgtaatcccaactactcaggaggctgaggtgggaggattgtttgaacttgggaggctgaggtaggagtgagcccagatcacgccactgcactcctgcctaggcaacagagctagaccctgtctcaaaataaaaaagaaaggataaaggagatttgattaatagattaataaactgttctttcctgattggttatgatgttgaactacttcccaaattatgtaaccaaatttctgtgtggctctggtgctattaggtcaaaactttggggaactaagcatgagatagcatactcctgtttccttctctgtcccagggaaatacaaattcccttttgcctcaattagagaaggatgtctattcttgctacaaattatgatttatgtcctggtgtcaaatgaagataagaataagatcaaagaaaggcaagatgattgtggaagagaaagaaaaaggattaatttagatttatttaaccaagaaacatttatttcgtatctcctatttccaggctgagtgctaagaaataaaatgatgagtagagtatagcctttctcctcaaggagcttaccctctaatcatgggagagacagacatgtaactagttaaaccatattgtttggtggcttgaaccatgccagtagtagccactattaaggaaggaactgaagggcacttactgatttgggtaatagtgggaaaaatcagagaggagggaggatttagattgaagtatgtgcttctattttagaaggggctgtatttactatgtttattacttaaaagttcataaaagccaataatacgggtttgagctgtgttagtaatgagttaacaaacatatcaggattatttaacctccctgagcccctgttctctaaatgggagaataataactctacctgattgagttcttggaaaataacatagtgtaatggaaagagcaggctttggaggaaaagaggatttgactttgcatctctatcaattaattgtgtgactttgagcaagttatttaactctctgagcttcactttccttatgtgcaaaatggataacaccatggcataagacaatcccatgaagataagatataaaagaagataatgtttgaaaagaaagaaggaagtggatgctttggaagaattaagcaggcagctttttctggaaacagctgatctatatgctaccaaggagagaatagaatactccaaaaccttcaaggggaaatattttaattttcttggttactttttctctatttactgtgtttggaaaattttcatggctaccatcaatattgtttttgatcgagttgggaaaacggatcctgtcacaagaggcattgagatcactgtgaattatctgggaatccaatttgatgtgaagttttggtcccaacacatttccttcattcttgttggaataatcatcgtcacatccatcagaggattgctgatcactcttaccaagttcttttatgccatctctagcagtaagtcctccaatgtcattgtcctgctattagcacagataatgggcatgtactttgtctcctctgtgctgctgatccgaatgagtatgcctttagaataccgcaccataatcactgaagtccttggagaactgcagttcaacttctatcaccgttggtttgatgtgatcttcctggtcagcgctctctctagcatactcttcctctatttggctcacaaacaggcaccagagaagcaaatggcaccttgaacttaagcctactacagactgttagaggccagtggtttcaaaatttagatataagaggggggaaaaatggaaccagggcctgacattttataaacaaacaaaatgctatggtagcatttttcaccttcatagcatactccttccccgtcaggtgatactatgaccatgagtagcatcagccagaacatgagagggagaactaactcaagacaatactcagcagagagcatcccgtgtggatatgaggctggtgtagaggcggagaggagccaagaaactaaaggtgaaaaatacactggaactctggggcaagacatgtctatggtagctgagccaaacacgtaggatttccgttttaaggttcacatggaaaaggttatagctttgccttgagattgactcattaaaatcagagactgt

SEQ ID NO: 178 - DNA, 2660 bp, Homo sapiens
gctggagagccgcagtcccggctgcagcacctgggagaaggcagaccgtgtgagggggcctgtggccccagcgtgctgtggcctccgggagtgggaagtggaggcaggagccttccttacacttcgccatgagtttcctgatcgactccagcatcatgattacctcccagatactattttttggatttgggtggcttttcttcatgcgccaattgtttaaagactatgagatacgtcagtatgttgtacaggtgatcttctccgtgacgtttgcattttcttgcaccatgtttgagctcatcatctttgaaatcttaggagtattgaatagcagctcccgttattttcactggaaaatgaacctgtgtgtaattctgctgatcctggttttcatggtgcctttttacattggctattttattgtgagcaatatccgactactgcataaacaacgactgcttttttcctgtctcttatggctgacctttatgtatttcttctggaaactaggagatccctttcccattctcagcccaaaacatgggatcttatccatagaacagctcatcagccgggttggtgtgattggagtgactctcatggctcttctttctggatttggtgctgtcaactgcccatacacttacatgtcttacttcctcaggaatgtgactgacacggatattctagccctggaacggcgactgctgcaaaccatggatatgatcataagcaaaaagaaaaggatggcaatggcacggagaacaatgttccagaagggggaagtgcataacaaaccatcaggtttctggggaatgataaaaagtgttaccacttcagcatcaggaagtgaaaataacaccatggcataagacaatcccatgaagataagatataaaagaagataatgtttgaaaagaaataaggtaatgtctgtaaatcctagcctatattagaacacagtaaagtattagttcccttttctaacattatattcagataatgtaggagaaagctatgctttattatagttattattctgtaactatttacaatcttgaacattacatttgacttaatctaactagataaatcaaaaaacaaatgaaactatctgtttgagctgcttgacttaagagaaactgagtggtaattgtttggtggcgatgctcttgatggagaagcttttacacacctgcgtcagaggttgggaaagttgctctgaagtagtgttgctggctatgaaacaggaaattgagaatataggcaactccgggaatccactgtaggaaaaactaaaagtatatgctttctcattgccatttcttgaaattcctatgtgattaaaaccttgatgcccattctgtgccagatcttactcttattcaacaggaagtggatgctttggaagaattaagcaggcagctttttctggaaacagctgatctatatgctaccaaggagagaatagaatactccaaaaccttcaaggggaaatattttaattttcttggttactttttctctatttactgtgtttggaaaattttcatggctaccatcaatattgtttttgatcgagttgggaaaacggatcctgtcacaagaggcattgagatcactgtgaattatctgggaatccaatttgatgtgaagttttggtcccaacacatttccttcattcttgttggaataatcatcgtcacatccatcagaggattgctgatcactcttaccaagttcttttatgccatctctagcagtaagtcctccaatgtcattgtcctgctattagcacagataatgggcatgtactttgtctcctctgtgctgctgatccgaatgagtatgcctttagaataccgcaccataatcactgaagtccttggagaactgcagttcaacttctatcaccgttggtttgatgtgatcttcctggtcagcgctctctctagcatactcttcctctatttggctcacaaacaggcaccagagaagcaaatggcaccttgaacttaagcctactacagactgttagaggccagtggtttcaaaatttagatataagaggggggaaaaatggaaccagggcctgacattttataaacaaacaaaatgctatggtagcatttttcaccttcatagcatactccttcaccctcaggtgatactatgaccatgagtagcatcagccagaacatgagagggagaactaactcaagacaatactcagcagagagcatcccgtgtggatatgaggctggtgtagaggcggagaggagccaagaaactaaaggtgaaaaatacactggaactctggggcaagagatgtctatggtagctgagccaaacacgtaggatttccgttttaaggttcacatggaaaaggttatagctttgccttgagattgactcattaaaatcagagactgtaacacttttgccttacgttcattttatcaagcatagcttggtatttattatgcttgtgtgatctaacatgagttagcatcccacacctcctcttctgatcctgccccattaaaataaccaagaggttatctgttcttttccgggaaaggggtggtatgcacctgaaatagattttaccaaaagaaaaaaaaaaaaaaaaaaaaaaaaaaaaaaaaaaagggcggccg

SEQ ID NO: 179 - DNA, 1891 bp, Homo sapiens; identical to SEQ ID NO: 176

SEQ ID NO: 180 - DNA, 1906 bp, Homo sapiens
agcacctgggagaaggcagaccgtgtgagggggcctgtcgagcgtgctgtggcctcggggagtgggaagtggaggcaggagccttccttacacttcgccatgagtttcctcatcgactccagcatcatgattacctcccagatactattttttggatttgggtggcttttcttcatgcgccaattgtttaaagactatgagatacgtcagtatgttgtacaggtgatcttctccgtgacgtttgcattttcttgcaccatgtttgagctcatcatctttgaaatcttaggagtattgaatagcagctcccgttattttcactggaaaatgaacctgtgtgtaattctgctgatcctggttttcatggtgcctttttacattggctattttattgtgagcaatatccgactactgcataaacaacgactgcttttttcctgtctcttatggctgacctttatgtatttcttctggaaactaggagatccctttcccattctcagcccaaaacatgggatcttatccatagaacagctcatcagccgggttggtgtgattggagtgactctcatggctcttctttctggatttggtgctgtcaactgcccatacacttacatgtcttacttcctcaggaatgtgactgacacggatattctagccctggaacggcgactgctgcaaaccatggatatgatcataagcaaaaagaaaaggatggcaatggcacggagaacaatgttccagaagggggaagtgcataacaaaccatcaggtttctggggaatgataaaaagtgttaccacttcagcatcaggaagtgaaaatcttactcttattcaacaggaagtggatgctttggaagaattaagcaggcagctttttctggaaacagctgatctatatgctaccaaggagagaatagaatactccaaaaccttcaaggggaaatattttaattttcttggttactttttctctatttactgtgtttggaaaattttcatggctaccatcaatattgtttttgatcgagttgggaaaacggatcctgtcacaagaggcattgagatcactgtgaattatctgggaatccaatttgatgtgaagttttggtcccaacacatttccttcattcttgttggaataatcatcgtcacatccatcagaggattgctgatcactcttaccaagttcttttatgccatctctagcagtaagtcctccaatgtcattgtcctgctattagcacagataatgggcatgtactttgtctcctctgtgctgctgatccgaatgagtatgcctttagaataccgcaccataatcactgaagtccttggagaactgcagttcaacttctatcaccgttggtttgatgtgatcttcctggtcagcgctctctctagcatactcttcctctatttggctcacaaacaggcaccagagaagcaaatggcaccttgaacttaagcctactacagactgttagaggccagtggtttcaaaatttagatataagaggggggaaaaatggaacccagggcctgacattttataaacaaacaaaatgctatggtagcatttttcaccttcatagcatactccttccccgtcaggtgatactatgaccatgagtagcatcagccagaacatgagagggagaactaactcaagacaatactcagcagagagcatcccgtgtggatatgaggctggtgtagaggcggagaggagccaagaaactaaaggtgaaaaatacactggaactctggggcaagacatgtctatggtagctgagccaaacacgtaggatttccgttttaaggttcacatggaaaaggttatagctttgccttgagattgactcattaaaatcagagactgtaaaaaaaaaaaaaaaaaa

SEQ ID NO: 181 - DNA, 1955 bp, Homo sapiens
agcttgatggcgtcgggctggagagccgcagtcccggctgcagcacctgggagaaggcagaccgtgtgagggggcctgtggccccagcgtgctgtggcctcggggagtgggaagtggaggcaggagccttccttacacttcgccatgagtttcctcatcgactccagcatcatgattacctcccagatactattttttggatttgggtggcttttcttcatgcgccaattgtttaaagactatgagatacgtcagtatgttgtacaggtgatcttctccgtgacgtttgcattttcttgcaccatgtttgagctcatcatctttgaaatcttaggagtattgaatagcagctcccgttattttcactggaaaatgaacctgtgtgtaattctgctgatcctggttttcatggtgcctttttacattggctattttattgtgagcaatatccgactacttttgtctcctctgtctcagtgcataaacaacgactgcttttttcctgtctcttatggctgacctttatgtatttcttctggaaactaggagatccctttcccattctcagcccaaaacatgggatcttatccatagaacagctcatcagccgggttggtgtgattggagtgactctcatggctcttctttctggatttggtgctgtcaactgcccatacacttacatgtcttacttcctcaggaatgtgactgacacggatattctagccctggaacggcgactgctgcaaaccatggatatgatcataagcaaaaagaaaaggatggcaatggcacggagaacaatgttccagaagggggaagtgcataacaaaccatcaggtttctggggaatgataaaaagtgttaccacttcagcatcaggaagtgaaaatcttactcttattcaacaggaagtggatgctttggaagaattaagcaggcagctttttctggaaacagctgatctatatgctaccaaggagagaatagaatactccaaaaccttcaaggggaaatattttaattttcttggttactttttctctatttactgtgtttggaaaattttcatggctaccatcaatattgtttttgatcgagttgggaaaacggatcctgtcacaagaggcattgagatcactgtgaattatctgggaatccaatttgatgtgaagttttggtcccaacacatttccttcattcttgttggaataatcatcgtcacatccatcagaggattgctgatcactcttaccaagttcttttatgccatctctagcagtaagtcctccaatgtcattgtcctgctattagcacagataatgggcatgtactttgtctcctctgtgctgctgatccgaatgagtatgcctttagaataccgcaccataatcactgaagtccttggagaactgcagttcaacttctatcaccgttggtttgatgtgatcttcctggtcagcgctctctctagcatactcttcctctatttggctcacaaacaggcaccagagaagcaaatggcaccttgaacttaagcctactacagactgttagaggccagtggtttcaaaatttagatataagaggggggaaaaatggaaccagggcctgacattttataaacaaacaaaatgctatggtagcatttttcaccttcatagcatactccttccccgtcaggtgatactatgaccatgagtagcatcagccagaacatgagagggagaactaactcaagacaatactcagcagagagcatcccgtgtggatatgaggctggtgtagaggcggagaggagccaagaaactaaaggtgaaaaatacactggaactctggggcaagacatgtctatggtagctgagccaaacacgtaggatttccgttttaaggttcacatggaaaaggttatagctttgccttgagattgactcattaaaatcagagactgtaac

SEQ ID NO: 182 - DNA, 1887 bp, Homo sapiens
gagggggcctgtggccccagcgtgctgtggcctcggggagtgggaagtggaggcaggagccttccttacacttcgccatgagtttcctcatcgactccagcatcatgattacctcccagatactattttttggatttgggtggcttttcttcatgcgccaattgtttaaagactatgagatacgtcagtatgttgtacaggtgatcttctccgtgacgtttgcattttcttgcaccatgtttgagctcatcatctttgaaatcttaggagtattgaatagcagctcccgttattttcactggaaaatgaacctgtgtgtaattctgctgatcctggttttcatggtgcctttttacattggctattttattgtgagcaatatccgactactgcataaacaacgactgcttttttcctgtctcttatggctgacctttatgtatttcttctggaaactaggagatccctttcccattctcagcccaaaacatgggatcttatccatagaacagctcatcagccgggttggtgtgattggagtgactctcatggctcttctttctggatttggtgctgtcaactgcccatacacttacatgtcttacttcctcaggaatgtgactgacacggatattctagccctggaacggcgactgctgcaaaccatggatatgatcataagcaaaaagaaaaggatggcaatggcacggagaacaatgttccagaagggggaagtgcataacaaaccatcaggtttctggggaatgataaaaagtgttaccacttcagcatcaggaagtgaaaatcttactcttattcaacaggaagtggatgctttggaagaattaagcaggcagctttttctggaaacagctgatctatatgctaccaaggagagaatagaatactccaaaaccttcaaggggaaatattttaattttcttggttactttttctctatttactgtgtttggaaaattttcatggctaccatcaatattgtttttgatcgagttgggaaaacggatcctgtcacaagaggcattgagatcactgtgaattatctgggaatccaatttgatgtgaagttttggtcccaacacatttccttcattcttgttggaataatcatcgtcacatccatcagaggattgctgatcactcttaccaagttcttttatgccatctctagcagtaagtcctccaatgtcattgtcctgctattagcacagataatgggcatgtactttgtctcctctgtgctgctgatccgaatgagtatgcctttagaataccgcaccataatcactgaagtccttggagaactgcagttcaacttctatcaccgttggtttgatgtgatcttcctggtcagcgctctctctagcatactcttcctctatttggctcacaaacaggcaccagagaagcaaatggcaccttgaacttaagcctactacagactgttagaggccagtggtttcaaaatttagatataagaggggggaaaaatggaaccagggcctgacattttataaacaaacaaaatgctatggtagcatttttcaccttcatagcatactccttccccgtcaggtgatactatgaccatgagtagcatcagccagaacatgagagggagaactaactcaagacaatactcagcagagagcatcccgtgtggatatgaggctggtgtagaggcggagaggagccaagaaactaaaggtgaaaaatacactggaactctggggcaagacatgtctatggtagctgagccaaacacgtaggatttccgttttaaggttcacatggaaaaggttatagctttgccttgagattgactcattaaaatcagagactgtaacaaaaaaaaaaaaaaaaaaa

SEQ ID NO: 183 - DNA, 1906 bp, Homo sapiens
tggaaacagctgatctatatgctaccaaggtacagagcaaggaaactgaagtgtggtttttaccaatattattaaagagagaacaagactaaatggctttttagatttctctgtggccaagcaagagatacctcacagcttctatatcagccatgaagcattagggataagggatcttcactcttcatgaaattgctcctgtcactagcaaaatccttaatggaacactctcaaaagtagcaattggtgggatagtcagaagaggcttttcaacatttaggaaggtggcacgtaccacctcctactaacctgggataaagatggtagctacttttattcctttataagttagtaatattataagagcagtagacacctatctgccatggatggcctagccctattttaaaggatccaggtcaataagtgtcgaaactgtaagaagtaactttcctatgtacacctaaaataaaatataatttaaatgtgcaaaatctgttagtgaagattacaaacttttaattctttttgaggataactttacaggagtaaccttataggacagaggttaacataggctttggaaacagataaacctgagcctactcaccagctgtgtgactttgagcaagttatcgaacctctcaaagcctcaattttctcatctgtaaaattaagataatagaacgtatctcataagaattgttatgaagattaagtggataatgcatgtaagatgtttatcccagtctctagctaaaagcaagcattcagtaaatgctggccacaactactgttattagtttaatattattacaatgtatggttttttgacttagcctgaacagtgattcatagagggaagaatacttgtgttgtatataaatttatattttgctgaaaactatgttttgtgtttgttttcccccaggagagaatagaatactccaaaaccttcaaggggaaatattttaattttcttggttactttttctctatttactgtgtttggaaaattttcatggctaccatcaatattgtttttgatcgagttgggaaaacggatcctgtcacaagaggcattgagatcactgtgaattatctgggaatccaatttgatgtgaagttttggtcccaacacatttccttcattcttgttggaataatcatcgtcacatccatcagaggattgctgatcactcttaccaagttcttttatgccatctctagcagtaagtcctccaatgtcattgtcctgctattagcacagataatgggcatgtactttgtctcctctgtgctgctgatccgaatgagtatgcctttagaataccgcaccataatcactgaagtccttggagaactgcagttcaacttctatcaccgttggtttgatgtgatcttcctggtcagcgctctctctagcatactcttcctctatttggctcacaaacaggcaccagagaagcaaatggcaccttgaacttaagcctactacagactgttagaggccagtggtttcaaaatttagatataagaggggggaaaaatggaaccagggcctgacattttataaacaaacaaaatgctatggtagcatttttcaccttcatagcatattccttccccgtcaggtgatactatgaccatgagtagcatcagccagaacatgagagggagaactaactcaagacaatactcagcagagagcatcccgtgtggatatgaggctggtgtagaggcggagaggagccaagaaactaaaggtgaaaaatacactggaactctggggcaagacatgtctatggtagctgagccaaacacgtaggatttccgttttaaggttcacatggaaaaggttatagctttgccttgagattgactcattaaaatcagagactgtaac

SEQ ID NO: 184 - DNA, 1072 bp, Homo sapiens
caggaagaggatgctttggaagaattaagcaggcagctttttctggaaacagctgatctatatgctaccaaggagagaatagaatactccaaaaccttcaaggggaaatattttaattttctaggttactttttctctatttactgagtttggaaaattttcatggctaccatcaatattgtttttgatcgagttgggaaaacggatcctgtcacaagaggcattgagatcactgtgaattatctgggaatccaatttgatgtgaagttttggtcccaacacatttccttcattcttgttggaataatcatcgtcacatccatcagaggattgctgatcactcttaccaagttcttttatgccatctctagcagtaagtcctccaatgtcattgtcctgctattagcacagataatgggcatgtactttgtctcctctgtgctgctgatccgaatgagtatgcctttagaataccgcaccataatcactgaagtccttggagaactgcggttcaacttctatcaccgttggtttgatgtgatcttcctggtcagcgctctctctagcatactcttcctctatttggctcacaaacaggcaccagagaagcaaatggcaccttgaacttaagcctactacagactgttagaggccagtggtttcaaaatttagatataagaggggggaaaaatggaaccagggcctgacattttataaacaaacaaaatgctatggtagcatttttcaccttcatagcatactccttccccctcaggtgatactatgaccatgagtagcatcagccagaacatgagagggagaactaactcaagacaatactcagcagagagcatcccgtgtggatatgaggctggtgtagaggcggagaggagccaagaaactaaaggtgaaaaatacactggaactctggggcaagagatgtctatggtagctgagccaaacacgtaggatttccgttttaaggttcacatggaaaaggttatagctttgccttgagattgactcattaaaatcagagactgtaaaaaaaaaaaaaaaaaaaaaaaaaaaa

SEQ ID NO: 185 - DNA, 769 bp, Homo sapiens
gatattggactgtggttgtgccagttgacactcaggagtggagactagatctgcaatctgttgggactgtgatgaggggatcatcctgccctcgaaccagacccagccctgtagcccaggcactattgcctggagttcctgggctctcagcgccaggaaatcatgaggttcagtgtctcaggcatgaggaccgactaccccaggagtgtgctggctcctgcttatgtgtcagtctgtctcctcctcttgtgtccaagggaagtcatcgctcccgctggctcagaaccatggctgtgccagccggcacccaggtgtggagacaagatctacaaccccttggagcagtgctgttacaatgacgccatcgtgtccctgagcgagacccgccaatgtggtcccccctgcaccttctggccctgctttgagctctgctgtcttgattcctttggcctcacaaacgattttgttgtgaagctgaaggttcagggtgtgaattcccagtgccactcatctcccatctccagtaaatgtgaaagcagaagacgttttccctgagaagacatagaaagaaaatcaactttcactaaggcatctcagaaacataggctaaggtaatatgtgtaccagtagagaagcctgaggaatttacaaaatgatgcagctccaagccattgtatggcccatgtgggagactgatgggacatggagaatgacagtagattatcaggaaataaataaagtggtttttccaatgtacacacctgtaccc

SEQ ID NO: 186 - DNA, 3205 bp, Homo sapiens
aaaggggcaagagctgagcggaacaccggcccgccgtcgcggcagctgcttcacccctctctctgcagccatggggctccctcgtggacctctcgcgtctctcctccttctccaggtttgctggctgcagtgcgcggcctccgagccgtgccgggcggtcttcagggaggctgaagtgaccttggaggcgggaggcgcggagcaggagcccggccaggcgctggggaaagtattcatgggctgccctgggcaagagccagctctgtttagcactgataatgatgacttcactgtgcggaatggcgagacagtccaggaaagaaggtcactgaaggaaaggaatccattgaagatcttcccatccaaacgtatcttacgaagacacaagagagattgggtggttgctccaatatctgtccctgaaaatggcaagggtcccttcccccagagactgaatcagctcaagtctaataaagatagagacaccaagattttctacagcatcacggggccgggggcagacagcccccctgagggtgtcttcgctgtagagaaggagacaggctggttgttgttgaataagccactggaccgggaggagattgccaagtatgagctctttggccacgctgtgtcagagaatggtgcctcagtggaggaccccatgaacatctccatcatcgtgaccgaccagaatgaccacaagcccaagtttacccaggacaccttccgagggagtgtcttagagggagtcctaccaggtacttctgtgatgcaggtgacagccacggatgaggatgatgccatctacacctacaatggggtggttgcttactccatccatagccaagaaccaaaggacccacacgacctcatgttcaccattcaccggagcacaggcaccatcagcgtcatctccagtggcctggaccgggaaaaagtccctgagtacacactgaccatccaggccacagacatggatggggacggctccaccaccacggcagtggcagtagtggagatccttgatgccaatgacaatgctcccatgtttgacccccagaagtacgaggcccatgtgcctgagaatgcagtgggccatgaggtgcagaggctgacggtcactgatctggacgcccccaactcaccagcgtggcgtgccacctaccttatcatgggcggtgacgacggggaccattttaccatcaccacccaccctgagagcaaccagggcatcctgacaaccaggaagggtttggattttgaggccaaaaaccagcacaccctgtacgttgaagtgaccaacgaggccccttttgtgctgaagctcccaacctccacagccaccatagtggtccacgtggaggatgtgaatgaggcacctgtgtttgtcccaccctccaaagtcgttgaggtccaggagggcatccccactggggagcctgtgtgtgtctacactgcagaagaccctgacaaggagaatcaaaagatcagctaccgcatcctgagagacccagcagggtggctagccatggacccagacagtgggcaggtcacagctgtgggcaccctcgaccgtgaggatgagcagtttgtgaggaacaacatctatgaagtcatggtcttggccatggacaatggaagccctcccaccactggcacgggaacccttctgctaacactgattgatgtcaatgaccatggcccagtccctgagccccgtcagatcaccatctgcaaccaaagccctgtgcgccaggtgctgaacatcacggacaaggacctgtctccccacacctcccctttccaggcccagctcacagatgactcagacatctactggacggcagaggtcaacgaggaaggtgacacagtggtcttgtccctgaagaagttcctgaagcaggatacatatgacgtgcacctttctctgtctgaccatggcaacaaagagcagctgacggtgatcagggccactgtgtgcgactgccatggccatgtcgaaacctgccctggaccctggaagggaggtttcatcctccctgtgctgggggctgtcctggctctgctgttcctcctgctggtgctgcttttgttggtgagaaagaagcggaagatcaaggagcccctcctactcccagaagatgacacccgtgacaacgtcttctactatggcgaagaggggggtggcgaagaggaccaggactatgacatcacccagctccaccgaggtctggaggccaggccggaggtggttctccgcaatgacgtggcaccaaccatcatcccgacacccatgtaccgtcctcggccagccaacccagatgaaatcggcaactttataattgagaacctgaaggcggctaacacagaccccacagccccgccctacgacaccctcttggtgttcgactatgagggcagcggctccgacgccgcgtccctgagctccctcacctcctccgcctccgaccaagaccaagattacgattatctgaacgagtggggcagccgcttcaagaagctggcagacatgtacggtggcggggaggacgactaggcggcctgcctgcagggctggggaccaaacgtcaggccacagagcatctccaaggggtctcagttcccccttcagctgaggacttcggagcttgtcaggaagtggccgtagcaacttggcggagacaggctatgagtctgacgttagagtggttgcttccttagcctttcaggatggaggaatgtgggcagtttgacttcagcactgaaaacctctccacctgggccagggttgcctcagaggccaagtttccagaagcctcttacctgccgtaaaatgctcaaccctgtgtcctgggcctgggcctgctgtgactgacctacagtggactttctctctggaatggaaccttcttaggcctcctggtgcaacttaatttttttttttaatgctatcttcaaaacgttagagaaagttcttcaaaagtgcagcccagagctgctgggcccactggccgtcctgcatttctggtttccagaccccaatgcctcccattcggatggatctctgcgtttttatactgagtgtgcctaggttgccccttattttttattttccctgttgcgttgctatagatgaagggtgaggacaatcgtgtatatgtactagaacttttttattaaagaaacttttcccagaaaaaaa

SEQ ID NO: 187 - DNA, 3632 bp, Homo sapiens
cttttttccgctgtagccgcaaggcaaggaaacatttctcttcccgtactgaggaggctgaggagtgcactgggtgttcttttctcctctaacccagaactgcgagacagaggctgagtccctgtaaagaacagctccagaaaagccaggagagcgcaggagggcatccgggaggccaggaggggttcgctggggcctcaaccgcacccacatcggtcccacctgcgagggggcgggacctcgtggcgctggaccaatcagcacccacctgcgctcacctggcctcctcccgctggctcccgggggctgcggtgctcaaaggggcaagagctgagcggaacaccggcccgccgtcgcggcagctgcttcacccctctctctgcagccatggggctccctcgtggacctctcgcgtctctcctccttctccaggtttgctggctgcagtgcgcggcctccgagccgtgccgggcggtcttcagggaggctgaagtgaccttggaggcgggaggcgcggagcaggagcccggccaggcgctggggaaagtattcatgggctgccctgggcaagagccagctctgtttagcactgataatgatgacttcactgtgcggaatggcgagacagtccaggaaagaaggtcactgaaggaaaggaatccattgaagatcttcccatccaaacgtatcttacgaagacacaagagagattgggtggttgctccaatatctgtccctgaaaatggcaagggtcccttcccccagagactgaatcagctcaagtctaataaagatagagacaccaagattttctacagcatcacggggccgggggcagacagcccccctgagggtgtcttcgctgtagagaaggagacaggctggttgttgttgaataagccactggaccgggaggagattgccaagtatgagctctttggccacgctgtgtcagagaatggtgcctcagtggaggaccccatgaacatctccatcatcgtgaccgaccagaatgaccacaagcccaagtttacccaggacaccttccgagggagtgtcttagagggagtcctaccaggtacttctgtgatgcaggtgacagccacagatgaggatgatgccatctacacctacaatggggtggttgcttactccatccatagccaagaaccaaaggacccacacgacctcatgttcacaattcaccggagcacaggcaccatcagcgtcatctccagtggcctggaccgggaaaaagtccctgagtacacactgaccatccaggccacagacatggatggggacggctccaccaccacggcagtggcagtagtggagatccttgatgccaatgacaatgctcccatgtttgacccccagaagtacgaggcccatgtgcctgagaatgcagtgggccatgaggtgcagaggctgacggtcactgatctggacgcccccaactcaccagcgtggcgtgccacctaccttatcatgggcggtgacgacggggaccattttaccatcaccacccaccctgagagcaaccagggcatcctgacaaccaggaagggtttggattttgaggccaaaaaccagcacaccctgtacgttgaagtgaccaacgaggccccttttgtgctgaagctcccaacctccacagccaccatagtggtccacgtggaggatgtgaatgaggcacctgtgtttgtcccaccctccaaagtcgttgaggtccaggagggcatccccactggggagcctgtgtgtgtctacactgcagaagaccctgacaaggagaatcaaaagatcagctaccgcatcctgagagacccagcagggtggctagccatggacccagacagtgggcaggtcacagctgtgggcaccctcgaccgtgaggatgagcagtttgtgaggaacaacatctatgaagtcatggtcttggccatggacaatggaagccctcccaccactggcacgggaacccttctgctaacactgattgatgtcaacgaccatggcccagtccctgagccccgtcagatcaccatctgcaaccaaagccctgtgcgccaggtgctgaacatcacggacaaggacctgtctccccacacctcccctttccaggcccagctcacagatgactcagacatctactggacggcagaggtcaacgaggaaggtgacacagtggtcttgtccctgaagaagttcctgaagcaggatacatatgacgtgcacctttctctgtctgaccatggcaacaaagagcagctgacggtgatcagggccactgtgtgcgactgccatggccatgtcgaaacctgccctggaccctggaaaggaggtttcatcctccctgtgctgggggctgtcctggctctgctgttcctcctgctggtgctgcttttgttggtgagaaagaagcggaagatcaaggagcccctcctactcccagaagatgacacccgtgacaacgtcttctactatggcgaagaggggggtggcgaagaggaccaggactatgacatcacccagctccaccgaggtctggaggccaggccggaggtggttctccgcaatgacgtggcaccaaccatcatcccgacacccatgtaccgtcctaggccagccaacccagatgaaatcggcaactttataattgaggggaggggagagaggggctcacagagaggaaatggaggcttgcagctggcaagaggcaggacccgccgctcctaactacctgttctctgttgccgcagaacctgaaggcggctaacacagaccccacagccccgccctacgacaccctcttggtgttcgactatgagggcagcggctccgacgccgcgtccctgagctccctcacctcctccgcctccgaccaagaccaagattacgattatctgaacgagtggggcagccgcttcaagaagctggcagacatgtacggtggcggggaggacgactaggcggcctgcctgcagggctggggaccaaacgtcaggccacagagcatctccaaggggtctcagttcccccttcagctgaggacttcggagcttgtcaggaagtggccgtagcaacttggcggagacaggctatgagtctgacgttagagtggttgcttccttagcctttcaggatggaggaatgtgggcagtttgacttcagcactgaaaacctctccacctgggccagggttgcctcagaggccaagtttccagaagcctcttacctgccgtaaaatgctcaaccctgtgtcctgggcctgggcctgctgtgactgacctacagtggactttctctctggaatggaaccttcttaggcctcctggtgcaacttaatttttttttttaatgctatcttcaaaacgttagagaaagttcttcaaaagtgcagcccagagctgctgggcccactggccgtcctgcatttctggtttccagaccccaatgcctcccattcggatggatctctgcgtttttatactgagtgtgcctaggttgccccttattttttattttccctgttgcgttgctatagatgaagggtgaggacaatcgtgtatatgtactagaacttttttattaaagaaacttttcccagaaaaaaaaaaaaaaaaaaa

SEQ ID NO: 188 - DNA, 3171 bp, Homo sapiens
gcggaacaccggcccgccgtcgcggcagctgcttcacccctctctctgcagccatggggctccctcgtggacctctcgcgtctctcctccttctccaggtttgctggctgcagtgcgcggcctccgagccgtgccgggcggtcttcagggaggctgaagtgaccttggaggcgggaggcgcggagcaggagcccggccaggcgctggggaaagtattcatgggctgccctgggcaagagccagctctgtttagcactgataatgatgacttcactgtgcggaatggcgagacagtccaggaaagaaggtcactgaaggaaaggaatccattgaagatcttcccatccaaacgtatcttacgaagacacaagagagattgggtggttgctccaatatctgtccctgaaaatggcaagggtcccttcccccagagactgaatcagctcaagtctaataaagatagagacaccaagattttctacagcatcacggggccgggggcagacagcccccctgagggtgtcttcgctgtagagaaggagacaggctggttgttgttgaataagccactggaccgggaggagattgccaagtatgagctctttggccacgctgtgtcagagaatggtgcctcagtggaggaccccatgaacatctccatcatcgtgaccgaccagaatgaccacaagcccaagtttacccaggacaccttccgagggagtgtcttagagggagtcctaccaggtacttctgtgatgcaggtgacagccacagatgaggatgatgccatctacacctacaatggggtggttgcttactccatccatagccaagaaccaaaggacccacacgacctcatgttcacaattcaccggagcacaggcaccatcagcgtcatctccagtggcctggaccgggaaaaagtccctgagtacacactgaccatccaggccacagacatggatggggacggctccaccaccacggcagtggcagtagtggagatccttgatgccaatgacaatgctcccatgtttgacccccagaagtacgaggcccatgtgcctgagaatgcagtgggccatgaggtgcagaggctgacggtcactgatctggacgcccccaactcaccagcgtggcgtgccacctaccttatcatgggcggtgacgacggggaccattttaccatcaccacccaccctgagagcaaccagggcatcctgacaaccaggaagggtttggattttgaggccaaaaaccagcacaccctgtacgttgaagtgaccaacgaggccccttttgtgctgaagctcccaacctccacagccaccatagtggtccacgtggaggatgtgaatgaggcacctgtgtttgtcccaccctccaaagtcgttgaggtccaggagggcatccccactggggagcctgtgtgtgtctacactgcagaagaccctgacaaggagaatcaaaagatcagctaccgcatcctgagagacccagcagggtggctagccatggacccagacagtgggcaggtcacagctgtgggcaccctcgaccgtgaggatgagcagtttgtgaggaacaacatctatgaagtcatggtcttggccatggacaatggaagccctcccaccactggcacgggaacccttctgctaacactgattgatgtcaacgaccatggcccagtccctgagccccgtcagatcaccatctgcaaccaaagccctgtgcgccacgtgctgaacatcacggacaaggacctgtctccccacacctcccctttccaggcccagctcacagatgactcagacatctactggacggcagaggtcaacgaggaaggtgacacagtggtcttgtccctgaagaagttcctgaagcaggatacatatgacgtgcacctttctctgtctgaccatggcaacaaagagcagctgacggtgatcagggccactgtgtgcgactgccatggccatgtcgaaacctgccctggaccctggaaaggaggtttcatcctccctgtgctgggggctgtcctggctctgctgttcctcctgctggtgctgcttttgttggtgagaaagaagcggaagatcaaggagcccctcctactcccagaagatgacacccgtgacaacgtcttctactatggcgaagaggggggtggcgaagaggaccaggactatgacatcacccagctccaccgaggtctggaggccaggccggaggtggttctccgcaatgacgtggcaccaaccatcatcccgacacccatgtaccgtcctaggccagccaacccagatgaaatcggcaactttataattgagaacctgaaggcggctaacacagaccccacagccccgccctacgacaccctcttggtgttcgactatgagggcagcggctccgacgccgcgtccctgagctccctcacctcctccgcctccgaccaagaccaagattacgattatctgaacgagtggggcagccgcttcaagaagctggcagacatgtacggtggcggggaggacgactaggcggcctgcctgcagggctggggaccaaacgtcaggccacagagcatctccaaggggtctcagttcccccttcagctgaggacttcggagcttgtcaggaagtggccgtagcaacttggcggagacaggctatgagtctgacgttagagtggttgcttccttagcctttcaggatggaggaatgtgggcagtttgacttcagcactgaaaacctctccacctgggccagggttgcctcagaggccaagtttccagaagcctcttacctgccgtaaaatgctcaaccctgtgtcctgggcctgggcctgctgtgactgacctacagtggactttctctctggaatggaaccttcttaggcctcctggtgcaacttaatttttttttttaatgctatcttcaaaacgttagagaaagttcttcaaaagtgcagcccagagctgctgggcccactggccgtcctgcatttctggtttccagaccccaatgcctcccattcggatggatctctgcgtttttatactgagtgtgcctaggttgccccttattttttattttccctgttgcgttgctatagatgaagggtgaggacaatcgtgtatatgtactagaacttttttattaaagaaa

SEQ ID NO: 189 - DNA, 1866 bp, Homo sapiens
cccagagcaagaccacagctggtgaacagtccaggagcagacaagatggagacaaattcctctctccccacgaacatctctggagggacacctgctgtatctgctggctatctcttcctggatatcatcacttatctggtatttgcagtcacctttgtcctcggggtcctgggcaacgggcttgtgatctgggtggctggattccggatgacacacacagtcaccaccatcagttacctgaacctggccgtggctgacttctgtttcacctccactttgccattcttcatggtcaggaaggccatgggaggacattggcctttcggctggttcctgtgcaaattcctctttaccatagtggacatcaacttgttcggaagtgtcttcctgatcgccctcattgctctggaccgctgtgtttgcgtcctgcatccagtctggacccagaaccaccgcaccgtgagcctggccaagaaggtgatcattgggccctgggtgatggctctgctcctcacattgccagttatcattcgtgtgactacagtacctggtaaaacggggacagtagcctgcacttttaacttttcgccctggaccaacgaccctaaagagaggataaatgtggccgttgccatgttgacggtgagaggcatcatccggttcatcattggcttcagcgcacccatgtccatcgttgctgtcagttatgggcttattgccaccaagatccacaagcaaggcttgattaagtccagtcgtcccttacgggtcctctcctttgtcgcagcagccttttttctctgctggtccccatatcaggtggtggcccttatagccacagtcagaatccgtgagttattgcaaggcatgtacaaagaaattggtattgcagtggatgtgacaagtgccctggccttcttcaacagctgcctcaaccccatgctctatgtcttcatgggccaggacttccgggagaggctgatccacgcccttcccgccagtctggagagggccctgaccgaggactcaacccaaaccagtgacacagctaccaattctactttaccttctgcagaggtggcgttacaggcaaagtgaggagggagctgggggacactttcgagctcccagctccagcttcgtctcaccttgagttaggctgagcacaggcatttcctgcttattttaggattacccactcatcagaaaaaaaaaaaaagcctttgtgtcccctgatttggggagaataaacagatatgagtttattattgacttcttttttgattttggacctcagcctcgggtggtcagggtgggaaatgataggaagaagctgtcatctgcatcctagtttgcctgaaatgaacccaaataatacccattattattagtcctgaattatgagtagtgaatgatacccatcattctggcatcatgatgagtagtgtccacttccattctgaaaagtgccctgctgtgaaaaataaattatatagtcatcctaggtaaatgaaggaggagggagaagtgtgaaagagtatggcttaaatcagacaagatatacaagaagatactttatatagggcaggagcggtggctcatgcctgtaatcccagcactttgggaggccgaggcaggcggatcaccagaggtcaggaattcgagaacagcctggccaacatggtgaaaccctgtctctactaaaaatacaaaaattagctgggcgtagtggcaggctcccgtaatcccagctactcaggagaccgaggcaggagaatcgcttggacctggaaggcggaggttgtagtgagccaagaaaacgccactacactccagcctgggtgacagagagagactccggctcag

SEQ ID NO: 190 - DNA, 1281 bp, Homo sapiens
cccagacctagaactacccagagcaagaccacagctggtgaacagtccaggagcagacaagatggagacaaattcctctctccccacgaacatctctggagggacacctgctgtatctgctggctatctcttcctggatatcatcacttatctggtatttgcagtcacctttgtcctcggggtcctgggcaacgggcttgtgatctgggtggctggattccggatgacacacacagtcaccaccatcagttacctgaacctggccgtggctgacttctgtttcacctccactttgccattcttcatggtcaggaaggccatgggaggacattggcctttcggctggttcctgtgcaaattcgtctttaccatagtggacatcaacttgttcggaagtgtcttcctgatcgccctcattgctctggaccgctgtgtttgcgtcctgcatccagtctggacccagaaccaccgcaccgtgagcctggccaagaaggtgatcattgggccctgggtgatggctctgctcctcacattgccagttatcattcgtgtgactacagtacctggtaaaacggggacagtagcctgcacttttaacttttcgccctggaccaacgaccctaaagagaggataaatgtggccgttgccatgttgacggtgagaggcatcatccggttcatcattggcttcagcgcacccatgtccatcgttgctgtcagttatgggcttattgccaccaagatccacaagcaaggcttgattaagtccagtcgtcccttacgggtcctctcctttgtcgcagcagccttttttctctgctggtccccatatcaggtggtggcccttatagccacagtcagaatccgtgagttattgcaaggcatgtacaaagaaattggtattgcagtggatgtgacaagtgccctggccttcttcaacagctgcctcaaccccatgctctatgtcttcatgggccaggacttccgggagaggctgatccacgcccttcccgccagtctggagagggccctgaccgaggactcaacccaaaccagtgacacagctaccaattctactttaccttctgcagaggtggagttacaggcaaagtgaggagggagctgggggacactttcgagctcccagctccagcttcgtctcaccttgagttaggctgagcacaggcatttcctgcttattttaggattacccactcatcagaaaaaaaaaaaaaagcctttgtgtcccctgatttggggagaataaacagatatgagttt

SEQ ID NO: 191 - DNA, 1281 bp, Homo sapiens; identical to SEQ ID NO: 190

SEQ ID NO: 192 - DNA, 1330 bp, Homo sapiens
agagcctgagtcactctccccaggagacccagacctagaactacccagagcaagaccacagctggtgaacagtccaggagcagacaagatggagacaaattcctctctccccacgaacatctctggagggacacctgctgtatctgctggctatctcttcctggatatcatcacttatctggtatttgcagtcacctttgtcctcggggtcctgggcaacgggcttgtgatctgggtggctggattccggatgacacacacagtcaccaccatcagttacctgaacctggccgtggctgacttctgtttcacctccactttgccattcttcatggtcaggaaggccatgggaggacattggcctttcggctggttcctgtgcaaattcgtctttaccatagtggacatcaacttgttcggaagtgtcttcctgatcgccctcattgctctggaccgctgtgtttgcgtcctgcatccagtctggacccagaaccaccgcaccgtgagcctggccaagaaggtgatcattgggccctgggtgatggctctgctcctcacattgccagttatcattcgtgtgactacagtacctggtaaaacggggacagtagcctgcacttttaacttttcgccctggaccaacgaccctaaagagaggataaatgtggccgttgccatgttgacggtgagaggcatcatccggttcatcattggcttcagcgcacccatgtccatcgttgctgtcagttatgggcttattgccaccaagatccacaagcaaggcttgattaagtccagtcgtcccttacgggtcctctcctttgtcgcagcagccttttttctctgctggtccccatatcaggtggtggcccttatagccacagtcagaatccgtgagttattgcaaggcatgtacaaagaaattggtattgcagtggatgtgacaagtgccctggccttcttcaacagctgcctcaaccccatgctctatgtcttcatgggccaggacttccgggagaggctgatccacgcccttcccgccagtctggagagggccctgaccgaggactcaacccaaactagtgacacagctaccaattctactttaccttctgcagaggtggagttacaggcaaagtgaggagggagctgggggacactttcgagctcccagctccagcttcgtctcaccttgagttaggctgagccacaggcatttcctgcttattttaggattacccactcatcagaaaaaaaaaaaaaagcctttgtgtcccctgatttggggagaataaacagatatgagtccaaaaaaaaaaaaaaaaaaaaa

SEQ ID NO: 193 - DNA, 1050 bp, Homo sapiens
atggagacaaattcctctctccccacgaacatctctggagggacacctgctgtatctgctggctatctcttcctggatatcatcacttatctggtatttgcagtcacctttgtcctcggggtcctgggcaacgggcttgtgatctgggtggctggattccggatgacacacacagtcaccaccatcagttacctgaacctggccgtggctgacttctgtttcacctccactttgccattcttcatggtcaggaaggccatgggaggacattggcctttcggctggttcctgtgcaaattcctctttaccatagtggacatcaacttgttcggaagtgtcttcctgatcgccctcattgctctggaccgctgtgtttgcgtcctgcatccagtctggacccagaaccaccgcaccgtgagcctggccaagaaggtgatcattgggccctgggtgatggctctgctcctcacattgccagttatcattcgtgtgactacagtacctggtaaaacggggacagtagcctgcacttttaacttttcgccctggaccaacgaccctaaagagaggataaatgtggccgttgccatgttgacggtgagaggcatcatccggttcatcattggcttcagcgcacccatgtccatcgttgctgtcagttatgggcttattgccaccaagatccacaagcaaggcttgattaagtccagtcctcccttacgggtcctctcctttgtcgcagcagccttttttctctgctggtccccatatcaggtggtggcccttatagccacagtcagaatccgtgagttattgcaaggcatgtacaaagaaattggtattgcagtggatgtgacaagtgccctggccttcttcaacagctgcctcaaccccatgctctatgtcttcatgggccaggacttccgggagaggctgatccacgcccttcccgccagtctggagagggccctgaccgaggactcaacccaaaccagtgacacagctaccaattctactttaccttctgcagaggtggcgttacaggcaaag

SEQ ID NO: 194 - DNA, 3935 bp, Homo sapiens
tccctcgctcaccccatcctctctcccgccccttcctggattccctcacccgtctcgatcccctctccgccctttcccagagacccagagcccctgaccccccgcgccctccccggagccccccgcgcgtgccgcggccatggcggccgtgcgcggggcgcccctgctcagctgcctcctggcgttgctggccctgtgccctggagggcgcccgcagacggtgctgaccgacgacgagatcgaggagttcctcgagggcttcctgtcagagctagaacctgagccccgggaggacgacgtggaggccccgccgcctcccgagcccaccccgcgggtccgaaaagcccaggcggggggcaagccagggaagcggccagggacggccgcagaagtgcctccggaaaagaccaaagacaaagggaagaaaggcaagaaagacaaaggccccaaggtgcccaaggagtccttggaggggtcccccaggccgcccaagaaggggaaggagaagccacccaaggccaccaagaagcccaaggagaagccacctaaggccaccaagaagcccaaggaggagccacccaaggccaccaagaagcccaaagagaagccacccaaggccaccaagaagcccccgtcagggaagaggccccccattctggctccctcagaaaccctggagtggccactgcccccaccccccagccctggccccgaggagctaccccaggagggaggggcgcccctctcaaataactggcagaatccaggagaggagacccatgtggaggcacaggagcaccagcctgagccggaggaggagaccgagcaacccacactggactacaatgaccagatcgagagggaggactatgaggactttgagtacattcggcgccagaagcaacccaggccacccccaagcagaaggaggaggcccgagcgggtctggccagagccccctgaggagaaggccccggccccagccccggaggagaggattgagcctcctgtgaagcctctgctgcccccgctgccccctgactatggtgatggttacgtgatccccaactacgatgacatggactattactttgggcctcctccgccccagaagcccgatgctgagcgccagacggacgaagagaaggaggagctgaagaaacccaaaaaggaggacagcagccccaaggaggagaccgacaagtgggcagtggagaagggcaaggaccacaaagagccccgaaagggcgaggagttggaggaggagtggacgcctacggagaaagtcaagtgtccccccattgggatggagtcacaccgtattgaggacaaccagatccgagcctcctccatgctgcgccacggcctgggggcacagcgcggccggctcaacatgcagaccggtgccactgaggacgactactatgatggtgcgtggtgtgccgaggacgatgccaggacccagtggatagaggtggacaccaggaggactacccggttcacaggcgtcatcacccagggcagagactccagcatccatgacgattttgtgaccaccttcttcgtgggcttcagcaatgacagccagacatgggtgatgtacaccaacggctatgaggaaatgacctttcatgggaacgtggacaaggacacacccgtgctgagtgagctcccagagccggtggtggctcgtttcatccgcatctacccactcacctggaatggcagcctgtgcatgcgcctggaggtgctggggtgctctgtggcccctgtctacagctactacgcacagaatgaggtggtggccaccgatgacctggatttccggcaccacagctacaaggacatgcgccagctcatgaaggtggtgaacgaggagtgccccaccatcacccgcacttacagcctgggcaagagctcacgaggcctcaagatctatgccatggagatctcagacaaccctggggagcatgaactgggggagcccgagttccgctacactgctgggatccatggcaacgaggtgctgggccgagagctgttgctgctgctcatgcagtacctgtgccgagagtaccgcgatgggaacccacgtgtgcgcagcctggtgcaggacacacgcatccacctggtgccctcactgaaccctgatggctacgaggtggcagcgcagatgggctcagagtttgggaactgggcgctgggactgtggactgaggagggctttgacatctttgaagatttcccggatctcaactctgtgctctggggagctgaggagaggaaatgggtcccctaccgggtccccaacaataacttgcccatccctgaacgctacctttcgccagatgccacggtatccacggaggtccgggccatcattgcctggatggagaagaaccccttcgtgctgggagcaaatctgaacggcggcgagcggctagtatcctacccctacgatatggcccgcacgcctacccaggagcagctgctggccgcagccatggcagcagcccggggggaggatgaggacgaggtctccgaggcccaggagactccagaccacgccatcttccggtggcttgccatctccttcgcctccgcacacctcaccttgaccgagccctaccgcggaggctgccaagcccaggactacaccggcggcatgggcatcgtcaacggggccaagtggaacccccggaccgggactatcaatgacttcagttacctgcataccaactgcctggagctctccttctacctgggctgtgacaagttccctcatgagagtgagctgccccgcgagtgggagaacaacaaggaggcgctgctcaccttcatggagcaggtgcaccgcggcattaagggggtggtgacggacgagcaaggcatccccattgccaacgccaccatctctgtgagtggcattaatcacggcgtgaagacagccagtggtggtgattactggcgaatcttgaacccgggtgagtaccgcgtgacagcccacgcggagggctacaccccgagcgccaagacctgcaatgttgactatgacatcggggccactcagtgcaacttcatcctggctcgctccaactggaagcgcatccgggagatcatggccatgaacgggaaccggcctatcccacacatagacccatcgcgccctatgaccccccaacagcgacgcctgcagcagcgacgcctacaacaccgcctgcggcttcgggcacagatgcggctgcggcgcctcaacgccaccaccaccctaggcccccacactgtgcctcccacgctgccccctgcccctgccaccaccctgagcactaccatagagccctggggcctcataccgccaaccaccgctggctgggaggagtcggagactgagacctacacagaggtggtgacagagtttgggaccgaggtggagcccgagtttgggaccaaggtggagcccgagtttgagacccagttggagcctgagttcgagacccagctggaacccgagtttgaggaagaggaggaggaggagaaagaggaggagatagccactggccaggcattccccttcacaacagtagagacctacacagtgaactttggggacttctgagatcagcgtcctaccaagaccccagcccaactcaagctacagcagcagcacttcccaagcctgctgaccacagtcacatcacccatcagcacatggaaggcccctggtatggacactgaaaggaagggctggtcctgcccctttgagggggtgcaaacatgactgggacctaagagccagaggctgtgtagaggctcctgctccacctgccagtctcgtaagagatggggttgctgcagtgttggagtaggggcagagggagggagccaaggtcactccaataaaacaagctcatggcaaaaaaaaaaaaaaaaaaaaa

SEQ ID NO: 195 - DNA, 3935 bp, Homo sapiens; identical to SEQ ID NO: 194

SEQ ID NO: 196 - DNA, 2839 bp, Homo sapiens
atggactattactttgggcctcctccgccccagaagcccgatgctgagcgccagacggacgaagagaaggaggagctgaagaaacccaaaaaggaggacagcagccccaaggaggagaccgacaagtgggcagtggagaagggcaaggaccacaaagagccccgaaagggcgaggagttggaggaggagtggacgcctacggagaaagtcaagtgtccccccattgggatggagtcacaccgtattgaggacaaccagatccgagcctcctccatgctgcgccacggcctgggggcacagcgcggccggctcaacatgcagaccggtgccactgaggacgactactatgatggtgcgtggtgtgccgaggacgatgccaggacccagtggatagaggtggacaccaggaggactacccggttcacaggcgtcatcacccagggcagagactccagcatccatgacgattttgtgaccaccttcttcgtgggcttcagcaatgacagccagacatgggtgatgtacaccaacggctatgaggaaatgacctttcatgggaacgtggacaaggacacacccgtgctgagtgagctcccagagccggtggtggctcgtttcatccgcatctacccactcacctggaatggcagcctgtgcatgcgcctggaggtgctggggtgctctgtggcccctgtctacagctactacgcacagaatgaggtggtggccaccgatgacctggatttccggcaccacagctacaaggacatgcgccagctcatgaaggtggtgaacgaggagtgccccaccatcacccgcacttacagcctgggcaagagctcacgaggcctcaagatctatgccatggagatctcagacaaccctggggagcatgaactgggggagcccgagttccgctacactgctgggatccatggcaacgaggtgctgggccgagagctgttgctgctgctcatgcagtacctgtgccgagagtaccgcgatgggaacccacgtgtgcgcagcctggtgcaggacacacgcatccacctggtgccctcactgaaccctgatggctacgaggtggcagcgcagatgggctcagagtttgggaactgggcgctgggactgtggactgaggagggctttgacatctttgaagatttcccggatctcaactctgtgctctggggagctgaggagaggaaatgggtcccctaccgggtccccaacaataacttgcccatccctgaacgctacctttcgccagatgccacggtatccacggaggtccgggccatcattgcctggatggagaagaaccccttcgtgctgggagcaaatctgaacggcggcgagcggctagtatcctacccctacgatatggcccgcacgcctacccaggagcagctgctggccgcagccatggcagcagcccggggggaggatgaggacgaggtctccgaggcccaggagactccagaccacgccatcttccggtggcttgccatctccttcgcctccgcacacctcaccttgaccgagccctaccgcggaggctgccaagcccaggactacaccggcggcatgggcatcgtcaacggggccaagtggaacccccggaccgggactatcaatgacttcagttacctgcataccaactgcctggagctctccttctacctgggctgtgacaagttccctcatgagagtgagctgccccgcgagtgggagaacaacaaggaggcgctgctcaccttcatggagcaggtgcaccgcggcattaagggggtggtgacggacgagcaaggcatccccattgccaacgccaccatctctgtgagtggcattaatcacggcgtgaagacagccagtggtggtgattactggcgaatcttgaacccgggtgagtaccgcgtgacagcccacgcggagggctacaccccgagcgccaagacctgcaatgttgactatgacatcggggccactcagtgcaacttcatcctggctcgctccaactggaagcgcatccgggagatcatggccatgaacgggaaccggcctatcccacacatagacccatcgcgccctatgaccccccaacagcgacgcctgcagcagcgacgcctacaacaccgcctgcggcttcgggcacagatgcggctgcggcgcctcaacgccaccaccaccctaggcccccacactgtgcctcccacgctgccccctgcccctgccaccaccctgagcactaccatagagccctggggcctcataccgccaaccaccgctggctgggaggagtcggagactgagacctacacagaggtggtgacagagtttgggaccgaggtggagcccgagtttgggaccaaggtggagcccgagtttgagacccagttggagcctgagtttgagacccagctggaacccgagtttgaggaagaggaggaggaggagaaagaggaggagatagccactggccaggcattccccttcacaacagtagagacctacacagtgaactttggggacttctgagatcagcgtcctaccaagaccccagcccaactcaagctacagcagcagcacttcccaagcctgctgaccacagtcacatcacccatcagcacatggaaggcccctggtatggacactgaaaggaagggctggtcctgcccctttgagggggtgcaaacatgactgggacctaagagccagaggctgtgtagaggctcctgctccacctgccagtctcgtaagagatggggttgctgcagtgttggagtaggggcagagggagggagccaaggtcactccaataaaacaagctcatggcaaa

SEQ ID NO: 197 - DNA, 2172 bp, Homo sapiens
attcccggcaccacagctacaaggacatgcgccagctcatgaaggtggtgaacgaggagtgccccaccatcacccgcacttacagcctgggcaagagctcacgaggcctcaagatctatgccatggagatctcagacaaccctggggagcatgaactgggtgagggtctgtgggggccagcagctggcctctgctgctgatgtgcagagctcactgcctcccgcctgttccggagcctctctggggattctggcttgtcttacagggccctaggagccccagctgtcccccagaccctcgggggagcccgagttccgctacactgctgggatccatggcaacgaggtgctgggccgagagctgttgctgctgctcatgcagtacctgtgccgagagtaccgcgatgggaacccacgtgtgcgcagcctggtgcaggacacacgcatccacctggtgccctcactgaaccctgatggctacgaggtggcagcgcagatgatttcccggatctcaactctgtgctctggggagctgaggagaggaaatgggtcccctaccgggtccccaacaataacttgcccatccctgaacgctacctttcgccagatgccacggtatccacggaggtccgggccatcattgcctggatggagaagaaccccttcgtgctgggatcaaatctgaacggcggcgagcggctagtatcctacccctacgatatggcccgcacgcctacccaggagcagctgctggccgcagccatggcagcagcccggggggaggatgaggacgaggtctccgaggcccaggagactccagaccacgccatcttccggtggcttgccatctccttcgcctccgcacacctcaccttgaccgagccctaccgcggaggctgccaagcccaggactacaccggcggcatgggcatcgtcaacgggtccaagtggaacccccggaccgggactatcaatgacttcagttacctgcataccaactgcctggagctctccttctacctgggctgtgacaagttccctcatgagagtgagctgccccgcgagtgggagaacaacaaggaggcgctgctcaccttcatggagcaggtgcaccgcggcattaagggggtggtgacggacgagcaaggcatccccattgccaacgccaccatctctgtgagtggcattaatcacggcgtgaagacagccagtggtggtgattactggcgaatcttgaacccgggtgagtaccgcgtgacagcccacgcggagggctacaccccgagcgccaagacctgcaatgttgactatgacatcggggccactcagtgcaacttcatcctggctcgctccaactggaagcgcatccgggagatcatggccatgaacgggaaccggcctatcccacacatagacccatcgcgccctatgaccccccaacagcgacgcctgcagcagcggcgcctacaacaccgcctgcggcttcgggtacagatgcggctgcggcgcctcaacgccaccaccaccctaggcccccacactgtgcctcccacgctgccccctgcccctgccaccaccctgagcactaccatagagccctggggcctcataccgccaaccaccgctgggtgggaggagtcggagactgagacctacacagaggtggtgacagagtttgggaccgaggtggagcccgagtttgggaccaaggtggagcccgagtttgagacccagttggagcctgagtttgagacccagctggaacccgagtttgaggaagaggaggaggaggaggaagaggaggagatagccactggccaggcattccccttcacaacagtagagacctacacagtgaactttggggacttctgagatcagcgtcctaccaagaccccagcccaactcaagctacagcagcagcacttcccaagcccgctgaccacagtcacatcacccatcagcacatggaaggcccctggtatggacactgaaaggaagggctggtcctgcccctttgagggggtgcaaacatgactgggacctaagagccagaggctgtgtagaggctcctgctccacctgccagtctcgtaagagatggggttgctgcagtgttggagtaggggcagagggagggagccaaggtcactccaataaaacaagctcatggc

SEQ ID NO: 198 - DNA, 4125 bp, Homo sapiens
cggctatccgcgcgggagtgcgccacgcggggccggagcgcctattagccgccaggacctcggagcgccccgaccacccctgagcccctctggcttcggagccccccagcaccccttcccgggtcccctcgcccaccctaatccactctccctccctttcccggattccctcgctcaccccatcctctctcccgccccttcctggattccctcacccgtctcgatcccctctccgccctttcccagagacccagagcccctgaccccccgcgccctccccggagccccccgcgcgtgccgcggccatggcggccgtgcgcggggcgcccctgctcagctgcctcctggcgttgctggccctgtgccctggagggcgcccgcagacggtgctgaccgacgacgagatcgaggagttcctcgagggcttcctgtcagagctagaacctgagccccgggaggacgacgtggaggccccgccgcctcccgagcccaccccgcgggtccgaaaagcccaggcggggggcaagccagggaagcggccagggacggccgcagaagtgcctccggaaaagaccaaagacaaagggaagaaaggcaagaaagacaaaggccccaaggtgcccaaggagtccttggaggggtcccccaggccgcccaagaaggggaaggagaagccacccaaggccaccaagaagcccaaggagaagccacctaaggccaccaagaagcccaaggagaagccacccaaggccaccaagaagcccaaagagaagccacccaaggccaccaagaagcccccgtcagggaagaggccccccattctggctccctcagaaaccctggagtggccactgcccccaccccccagccctggccccgaggagctaccccaggagggaggggcgcccctctcaaataactggcagaatccaggagaggagacccatgtggaggcacgggagcaccagcctgagccggaggaggagaccgagcaacccacactggactacaatgaccagatcgagagggaggactatgaggactttgagtacattcggcgccagaagcaacccaggccacccccaagcagaaggaggaggcccgagcgggtctggccagagccccctgaggagaaggccccggccccagccccggaggagaggattgagcctcctgtgaagcctctgctgcccccgctgccccctgactatggtgatggttacgtgatccccaactacgatgacatggactattactttgggcctcctccgccccagaagcccgatgctgagcgccagacggacgaagagaaggaggagctgaagaaacccaaaaaggaggacagcagccccaaggaggagaccgacaagtgggcagtggagaagggcaaggaccacaaagagccccgaaagggcgaggagttggaggaggagtggacgcctacggagaaagtcaagtgtccccccattgggatggagtcacaccgtattgaggacaaccagatccgagcctcctccatgctgcgccacggcctgggggcacagcgcggccggctcaacatgcagaccggtgccactgaggacgactactatgatggtgcgtggtgtgccgaggacgatgccaggacccagtggatagaggtggacaccaggaggactacccggttcacaggcgtcatcacccagggcagagactccagcatccatgacgattttgtgaccaccttcttcgtgggcttcagcaatgacagccagacatgggtgatgtacaccaacggctatgaggaaatgacctttcatgggaacgtggacaaggacacacccgtgctgagtgagctcccagagccggtggtggctcgtttcatccgcatctacccactcacctggaatggcagcctgtgcatgcgcctggaggtgctggggtgctctgtggcccctgtctacagctactacgcacagaatgaggtggtggccaccgatgacctggatttccggcaccacagctacaaggacatgcgccagctcatgaaggtggtgaacgaggagtgccccaccatcacccgcacttacagcctgggcaagagctcacgaggcctcaagatctatgccatggagatctcagacaaccctggggagcatgaactgggggagcccgagttccgctacactgctgggatccatggcaacgaggtgctgggccgagagctgttgctgctgctcatgcagtacctgtgccgagagtaccgcgatgggaacccacgtgtgcgcagcctggtgcaggacacacgcatccacctggtgccctcactgaaccctgatggctacgaggtggcagcgcagatgggctcagagtttgggaactgggcgctgggactgtggactgaggagggctttgacatctttgaagatttcccggatctcaactctgtgctctggggagctgaggagaggaaatgggtcccctaccgggtccccaacaataacttgcccatccctgaacgctacctttcgccagatgccacggtatccacggaggtccgggccatcattgcctggatggagaagaaccccttcgtgctgggagcaaatctgaacggcggcgagcggctagtatcctacccctacgatatggcccgcacgcctacccaggagcagctgctggccgcagccatggcagcagcccggggggaggatgaggacgaggtctccgaggcccaggagactccagaccacgccatcttccggtggcttgccatctccttcgcctccgcacacctcaccttgaccgagccctaccgcggaggctgccaagcccaggactacaccggcggcatgggcatcgtcaacggggccaagtggaacccccggaccgggactatcaatgacttcagttacctgcataccaactgcctggagctctccttctacctgggctgtgacaagttccctcatgagagtgagctgccccgcgagtgggagaacaacaaggaggcgctgctcaccttcatggagcaggtgcaccgcggcattaagggggtggtgacggacgagcaaggcatccccattgccaacgccaccatctctgtgagtggcattaatcacggcgtgaagacagccagtggtggtgattactggcgaatcttgaacccgggtgagtaccgcgtgacagcccacgcggagggctacaccccgagcgccaagacctgcaatgttgactatgacatcggggccactcagtgcaacttcatcctggctcgctccaactggaagcgcatccgggagatcatggccatgaacgggaaccggcctatcccacacatagacccatcgcgccctatgaccccccaacagcgacgcctgcagcagcgacgcctacaacaccgcctgcggcttcgggcacagatgcggctgcggcgcctcaacgccaccaccaccctaggcccccacactgtgcctcccacgctgccccctgcccctgccaccaccctgagcactaccatagagccctggggcctcataccgccaaccaccgctggctgggaggagtcggagactgagacctacacagaggtggtgacagagtttgggaccgaggtggagcccgagtttgggaccaaggtggagcccgagtttgagacccagttggagcctgagtttgagacccagctggaacccgagtttgaggaagaggaggaggaggagaaagaggaggagatagccactggccaggcattccccttcacaacagtagagacctacacagtgaactttggggacttctgagatcagcgtcctaccaagaccccagcccaactcaagctacagcagcagcacttcccaagcctgctgaccacagtcacatcacccatcagcacatggaaggcccctggtatggacactgaaaggaagggctggtcctgcccctttgagggggtgcaaacatgactgggacctaagagccagaggctgtgtagaggctcctgctccacctgccagtctcgtaagagatggggttgctgcagtgttggagtaggggcagagggagggagccaaggtcactccaataaaacaagctcatggcaaaaaaaaaaaaaaaaaaaaaaaaaaaaaaaaaaaaaaaaaaaaa

SEQ ID NO: 199 - DNA, 2660 bp, Homo sapiens
accagcccctcggataccacttggccactcccgctgaggccactcccactgcgtggctgaagcctcgaggtcaccaggcggaggcgcggagatgcccctgcatcagctgggggacaagccgctcaccttccccagccccaactcagccatggaaaacgggcttgaccacaccccacccagcaggagggcatccccgggcacacccctgagccccggctccctccgctccgctgcccatagccccctggacaccagcaagcagcccctctgccagctctgggccgagaagcatggcgcccgggggacccatgaggtgcggtacgtctcggccgggcagagcgtggcgtgcggctggtgggccttcgcaccgccgtgcctgcaggtcctcaacacgcccaagggcatcctgttcttcctgtgtgcggccgcattcctgcaggggatgactgtgaatggcttcatcaacacagtcatcacctccctggagcgccgctatgacctgcacagctaccagagcgggctcatcgccagctcctacgacattgccgcctgcctctgcctcaccttcgtcagctacttcgggggctcagggcacaagccgcgctggctgggctggggcgtgctgcttatgggcacggggtcgctggtgttcgcgctgccccacttcacggctggccgctatgaggtggagttggacgcgggtgtcaggacgtgccctgccaaccccggcgcggtgtgtgcggacagcacctcgggcctgtcccgctaccagctggtcttcatgctgggccagttcctgcatggcgtgggtgccacacccctctacacgctgggcgtcacctacctggatgagaacgtcaagtccagctgctcgcccgtctacattgccatcttctacacagcggccatcctgggcccagctgccggctacctgattggaggtgccctgctgaatatctacacggaaatgggccgacggacggagctgaccaccgagagcccactgtgggtcggcgcctggtgggtcggcttcctgggctctggggccgctgctttcttcaccgccgttcccatccttggttaccctcggcagctgccaggctcccagcgctacgcggtcatgagagcggcggaaatgcaccagttgaaggacagcagccgtggggaggcgagcaacccggactttgggaaaaccatcagagacctgcctctctccatctggctcctgctgaagaaccccacgttcatcctgctctgcctggccggggccaccgaggccactctcatcaccggcatgtccacgttcagccccaagttcttggagtcccagttcagcctgagtgcctcagaagctgccaccttgtttgggtacctggtggtgccagcgggtggtggcggcaccttcctgggcggcttctttgtgaacaagctcaggctccggggctccgcggtcatcaagttctgcctgttctgcaccgttgtcagcctgctgggcatcctcgtcttctcactgcactgccccagtgtgcccatggcgggcgtcacagccagctacggcgggagcctcctgcccgaaggccacctgaacctaacggctccctgcaacgctgcctgcagctgccagccagaacactacagccctgtgtgcggctcggacggcctcatgtacttctcactgtgccacgcagggtgccctgcagccacggagacgaatgtggacggccagaaggtgtaccgagactgtagctgtatccctcagaatctttcctctggttttggccatgccactgcagggaaatgcacttcaacttgtcagagaaagcccctccttctggttttcatattcgttgtaattttctttacattcctcagcagcattcctgcactaacggcaactctacgatgtgtccgtgaccctcagagatcctttgccctgggaatccagtggattgtagttagaatactagggggcatcccggggcccatcgccttcggctgggtgatcgacaaggcctgtctgctgtggcaggaccagtgtggccagcagggctcctgcttggtgtaccagaattcggccatgagccgctacatactcatcatggggctcctgtacaaggtgctgggcgtcctcttctttgccatagcctgcttcttatacaagcccctgtcggagtcttcagatggcctggaaacttgtctgcccagccagtcctcagcccctgacagtgccacagatagccagctccagagcagcgtctgaccaccgcccgcgcccacccggccacggcgggcactcagcatttcctgatgacagaacagtgccgttgggtgatgcaatcacacgggaacttctatttgacctgcaaccttctacttaacctgtggtttaaagtcggctgtgacctcctgtccccagagctgtacggccctgcagtgggtgggaggaacttgcataaatatatatttatggacacacagtttgcatcagaacgtgtttatagaatgtgttttatacccgatcgtgtgtggtgtgcgtgaggacaaactccgcaggggctgtgaatcccactgggagggcggtgggcctgcagcccgaggaaggcttgtgtgtcctcagttaaaactgtgcatatcgaaatatattttgttatttaagcctg

SEQ ID NO: 200 - DNA, 894 bp, Homo sapiens
actacagccctgtgtgcggctcggacggcctcatgtacttctcactgtgccacgcagggtgccctgcagccacggagacgaatgtggacggccagaagatgtgtccgtgaccctcagagatcctttgccctgggaatccagtggattgtagttagaatactagggggcatcccggggcccatcgccttcggctgggtgatcgacaaggcctgtctgctgtggcaggaccagtgtggccagcagggctcctgcttggtgtaccagaattcggccatgagccgctacatactcatcatggggctcctgtacaaggtgctgggcgtcctcttctttgccatagcctgcttcttatacaagcccctgtcggagtcttcagatggcctggaaacttgtctgcccagccagtcctcagcccctgacagtgccacagatagccagctccagagcagcgtctgaccaccgcccgcgcccacccggccacggcgggcactcagcatttcctgatgacagaacagtgccgttgggtgatgcaatcacacgggaacttctatttgacctgcaaccttctacttaacctgtggtttaaagtcggctgtgacctcctgtccccagagctgtacggccctgcagtgggtgggaggaacttgcataaatatatatttatggacacacagtttgcatcagaacgtgtttatagaatgtgttttatacccgatcgtgtgtggtgtgcgtgaggacaaactccgcaggggctgtgaatcccactgggagggcggcgggcctgcagcccgaggaaggcttgtgtgtcctcagttaaaactgtgcatatcgaaatatattttgttatttaagcctgaaaaaaaaaaaaaaaaaaaaaaaaaaaaaaaaaaaaaa

SEQ ID NO: 201 - DNA, 2750 bp, Homo sapiens
ggctgccggggaggccagagcgtggagcgctgcgcggcgcggcggccgggccctcgagacggggacggacacaccagcccctcagataccacttggccactcccgctgaggccactcccactgcgtggctgaagcctcgaggtcaccaggcggaggcgcggagatgcccctgcatcagctgggggacaagccgctcaccttccccagccccaactcagccatggaaaacgggcttgaccacaccccacccagcaggagggcatccccgggcacacccctgagccccggctccctccgctccgctgcccatagccccctggacaccagcaagcagcccctctgccagctctgggccgagaagcatggcgcccgggggacccatgaggtgcggtacatctcggccgggcagagcgtggcgtgcggctggtgggccttcgcaccgccgtgcctgcaggtcctcaacacgcccaagggcatcctgttcttcctgtgtgcggccgcattcctgcaggggatgactgtgaatggcttcatcaacacagtcatcacctccctggagcgccgctatgacctgcacagctaccagagcgggctcatcgccagctcctacgacattgccgcctgcctctgcctcaccttcgtcagctacttcgggggctcagggcacaagccgcgctggctgggctggggcgtgctgcttatgggcacgggttcgctggtgttcgcgctgccccacttcacggctggccgctatgaggtggagttggacgcgggtgtcaggacgtgccctgccaaccccggcgcggtgtgtgcggacagcacctcgggcctgtcccgctaccagctggtcttcatgctgggccagttcctgcatggcgtgggtgccacacccctctacacgctgggcgtcacctacctggatgagaacgtcaagtccagctgctcgcccgtctacattgccatcttctacacagcggccatcctgggcccagctgccggctacctgattggaggtgccctgctgaatatctacacggaaatgggccgacggacggagctgaccaccgagagcccactgtgggtcggcgcctggtgggtcggcttcctgggctctggggccgctgctttcttcaccgccgttcccatccttggttaccctcggcagctgccaggctcccagcgctacgcggtcatgagagcggcggaaatgcaccagttgaaggacagcagccgtggggaggcgagcaacccggactttgggaaaaccatcagagacctgcctctctccatctggctcctgctgaagaaccccacgttcatcctgctctgcctggccggggccaccgaggccactctcatcaccggcatgtccacgttcagccccaagttcttggagtcccagttcagcctgagtgcctcagaagctgccaccttgtttgggtacctggtggtgccagcgggtggtggcggcaccttcctgggcggcttctttgtgaacaagctcaggctccggggctccgcggtcatcaagttctgcctgttctgcaccgttgtcagcctgctgggcatcctcgtcttctcactgcactgccccagtgtgcccatggcgggcgtcacagccagctacggcgggagcctcctgcccgaaggccacctgaacctaacggctccctgcaacgctgcctgcagctgccagccagaacactacagccctgtgtgcggctcggacggcctcatgtacttctcactgtgccacgcagggtgccctgcagccacggagacgaatgtggacggccagaaggtgtaccgagactgtagctgtatccctcagaatctttcctctggttttggccatgccactgcagggaaatgcacttcaacttgtcagagaaagcccctccttctggttttcatattcgttgtaattttctttacattcctcagcagcattcctgcactaacggcaactctacgatgtgtccgtgaccctcagagatcctttgccctgggaatccagtggattgtagttagaatactagggggcatcccggggcccatcgccttcggctgggtgatcgacaaggcctgtctgctgtggcaggaccagtgtggccagcagggctcctgcttggtgtaccagaattcggccatgagccgctacatactcatcatggggctcctgtacaaggtgctgggcgtcctcttctttgccatagcctgcttcttatacaagcccctgtcggagtcttcagatggcctggaaacttgtctgcccagccagtcctcagcccctgacagtgccacagatagccagctccagagcagcgtctgaccaccgcccgcgcccacccggccacggcgggcactcagcatttcctgatgacagaacagtgccgttgggtgatgcaatcacacgggaacttctatttgacctgcaaccttctacttaacctgtggtttaaagtcggctgtgacctcctgtccccagagctgtacggccctgcagtgggtgggaggaacttgcataaatatatatttatggacacacagtttgcatcagaacgtgtttatagaatgtgttttatacccgatcgtgtgtggtgtgcgtgaggacaaactccgcaggggctgtgaatcccactgggagggcggcgggcctgcagcccgaggaaggcttgtgtgtcctcagttaaaactgtgcatatcgaaatatattttgttatttaagcctgaaaaaaaaaaaaaaaaaa

SEQ ID NO: 202 - DNA, 3097 bp, Homo sapiens
aattccgggcggcgcggcggccgggccctcgagacggggacggacacaccagcccctcggataccacttggccactcccgctgaggccactcccactgcgtgctgaagcctcgaggtcaccaggcggaggcgcggagatgcccctgcatcagctgggggacaagccgctcaccttccccagccccaactcagccatggaaaacgggcttgaccacaccccacccagcaggagggcatccccgggcacacccctgagccccggctccctccgctccgctgcccatagccccctggacaccagcaagcagcccctctgccagctctgggccgagaagcatggcgcccgggggacccatgaggtgcggtacgtctcggccgggcagagcgtggcgtgcggctggtgggccttcgcaccgccgtgcctgcaggtcctcaacacgcccaagggcatcctgttcttcctgtgtgcggccgcattcctgcaggggatgactgtgaatggcttcatcaacacagtcatcacctccctggagcgccgctatgacctgcacagctaccagagcgggctcatcgccagctcctacgacattgccgcctgcctctgcctcaccttcgtcagctacttcgggggctcagggcacaagccgcgctggctgggctggggcgtgctgcttatgggcacggggtcgctggtgttcgcgctgccccacttcacggctggccgctatgaggtggagttggacgcgggtgtcaggacgtgccctgccaaccccggcgcggtgtgtgcggacagcacctcgggcctgtcccgctaccagctggtcttcatgctgggccagttcctgcatggcgtgggtgccacacccctctacacgctgggcgtcacctacctggatgagaacgtcaagtccagctgctcgcccgtctacattgccatcttctacacagcggccatcctgggcccagctgccggctacctgattggaggtgccctgctgaatatctacacggaaatgggccgacggacggagctgaccaccgagagcccactgtgggtcggcgcctggtgggtcggcttcctgggctctggggccgctgctttcttcaccgccgttcccatccttggttaccctcggcagctgccaggctcccagcgctacgcggtcatgagagcggcggaaatgcaccagttgaaggacagcagccgtggggaggcgagcaacccggactttgggaaaaccatcagagacctgcctctctccatctggctcctgctgaagaaccccacgttcatcctgctctgcctggccggggccaccgaggccactctcatcaccggcatgtccacgttcagccccaagttcttggagtcccagttcagcctgagtgcctcagaagctgccaccttgtttgggtacctggtggtgccagcgggtggtggcggcaccttcctgggcggcttctttgtgaacaagctcaggctccggggctccgcggtcatcaagttctgcctgttctgcaccgttgtcagcctgctgggcatcctcgtcttctcactgcactgccccagtgtgcccatggcgggcgtcacagccagctacggcgggagcctcctgcccgaaggccacctgaacctaacggctccctgcaacgctgcctgcagctgccagccagaacactacagccctgtgtgcggctcggacggcctcatgtacttctcactgtgccacgcagggtgccctgcagccacggagacgaatgtggacggccagaaggtgagtggagccgctgcctaccgcccctgtcctcccctggaccctgggaaggggcccccgtgccttccccttgtaatcggagctattgttgggcttcccaggtgtaccgagactgtagctgtatccctcagaatctttcctctggttttggccatgcactgcagggaaatgcacttcaacttgtcagagaaagcccctccttctggttttcatattcgttgtaattttctttacattcctcagcagcattcctgcactaacggcaactctacggtaagctggggtcgggtgtgcgcttgtccagagctttccttgcagcaccctgaggcggagctctgcagatcctgagacaggagcactccaggaaacacccaggtctaagcgggcctgtctgtcactggtggcaggagagacctcactgtctctgatctctgacgaggggcttcccacttgggggggggtgatgatgtggctggggactggtccaggaggccactggcctagggggtgacttggcatgcaaccccacttctgtgggtgctgacgctgtggttttctattgcagatgtgtccgtgaccctcagagatcctttgccctgggaatccagtggattgtagttagaatactagggggcatcccggggcccatcgccttcggctgggtgatcgacaaggcctgtctgctgtggcaggaccagtgtggccagcagggctcctgcttggtgtaccagaattcggccatgagccgctacatactcatcatggggctcctgtacaaggtgctgggcgtcctcttctttgccatagcctgcttcttatacaagcccctgtcggagtcttcagatggcctggaaacttgtctgcccagccagtcctcagcccctgacagtgccacagatagccagctccagagcagcgtctgaccaccgcccgcgcccacccggccacggcgggcactcagcatttcctgatgacagaacagtgccgttgggtgatgcaatcacacgggaacttctatttgacctgcaaccttctacttaacctgtggtttaaagtcggctgtgacctcctgtccccagagctgtacggccctgcagtgggtgggaggaacttgcataaatatatatttatggacacacagtttgcatcagaacgtgtttatagaatgtgttttatacccgatcgtgtgtggtgtgcgtgaggacaaactccgcaggggctgtgaatcccactgggagggcggcgggcctgcagcccgaggaaggcttgtgtgtcctcagttaaaactgtgcatatcgaaatatattttgttcctcgtgccg

SEQ ID NO: 203 - DNA, 2174 bp, Homo sapiens
agagcgtggagcgctgcgcggcgcggcggccgggccctcgagacggggacggacacaccagcccctcagataccacttggccactcccgctgaggccactcccactgcgtggctgaagcctcgaggtcaccaggcggaggcgcggagatgcccctgcatcagctgggggacaagccgctcaccttccccagccccaactcagccatggaaaacgggcttgaccacaccccacccagcaggagggcatccccgggcacacccctgagccccggctccctccgctccgctgcccatagccccctggacaccagcaagcagcccctctgccagctctgggccgagaagcatggcgcccgggggacccatgaggtgcggtacatctcggccgggcagagcgtggcgtgcggctggtgggccttcgcaccgccgtgcctgcaggtcctcaacacgcccaagggcatcctgttcttcctgtgtgcggccgcattcctgcaggggatgactgtgaatggcttcatcaacacagtcatcacctccctggagcgccgctatgacctgcacagctaccagagcgggctcatcgccagctcctacgacattgccgcctgcctctgcctcaccttcgtcagctacttcgggggctcagggcacaagccgcgctggctgggctggggcgtgctgcttatgggcacgggttcgctggtgttcgcgctgccccacttcacggctggccgctatgaggtggagttggacgcgggtgtcaggacgtgccctgccaaccccggcgcggtgtgtgcggacagcacctcgggcctgtcccgctaccagctggtcttcatgctgggccagttcctgcatggcgtgggtgccacacccctctacatgctgggcgtcctcttctttgccatagcctgcttcttatacaagcccctgtcggagtcccagttcagcctgagtgcctcagaagctgccaccttgtttgggtacctggtggtgccagcgggtggtggcggcaccttcctgggcggcttctttgtgaacaagctcaggctccggggctccgcggtcatcaagttctgcctgttctgcaccgttgtcagcctgctgggcatcctcgtcttctcactgcactgccccagtgtgcccatggcgggcgtcacagccagctacggcgggagcctcctgcccgaaggccacctgaacctaacggctccctgcaacgctgcctgcagctgccagccagaacactacagccctgtgtgcggctcggacggcctcatgtacttctcactgtgccacgcagggtgccctgcagccacggagacgaatgtggacggccagaaggtgtaccgagactgtagctgtatccctcagaatctttcctctggttttggccatgccactgcagggaaatgcacttcaacttgtcagagaaagcccctccttctggttttcatattcgttgtaattttctttacattcctcagcagcattcctgcactaacggcaactctacgatgtgtccgtgaccctcagagatcctttgccctgggaatccagtggattgtagttagaatactagggggcatcccggggcccatcgccttcggctgggtgatcgacaaggcctgtctgctgtggcaggaccagtgtggccagcagggctcctgcttggtgtaccagaattcggccatgagccgctacatactcatcatggggctcctgtacaaggtgctgggcgtcctcttctttgccatagccagctccagagcagcgtctgaccaccgcccgcgcccacccggccacggcgggcactcagcatttcctgatgacagaacagtgccgttgggtgatgcaatcacacgggaacttctatttgacctgcaaccttctacttaacctgcggtttaaagtcggctgtgacctcctgtccccagagctgtacggccctgcagtgggtgggaggaacttgcataaatatatatttatggacacacagtttgcatcagaacgtgtttatagaatgtgttttatacccgatcgtgtgtggtgtgcgtgaggacaaactccgcaggggctgtgaatcccactgggagggcggtgggcctgcagcccgaggaaggcttgtgtgtcctcagttaaaactgtgcatatcgaaatatattttgttattt

SEQ ID NO: 204 - DNA, 2169 bp, Homo sapiens
atgcccctgcatcagctgggggacaagccgctcaccttccccagccccaactcagccatggaaaacgggcttgaccacaccccacccagcaggagggcatccccgggcacacccctgagccccggctccctccgctccgctgcccatagccccctggacaccagcaagcagcccctctgccagctctgggccgagaagcatggcgcccgggggacccatgaggtgcggtacgtctcggccgggcagagcgtggcgtgcggctggtgggccttcgcaccgccgtgcctgcaggtcctcaacacgcccaagggcatcctgttcttcctgtgtgcggccgcattcctgcaggggatgactgtgaatggcttcatcaacacagtcatcacctccctggagcgccgctatgacctgcacagctaccagagcgggctcatcgccagctcctacgacattgccgcctgcctctgcctcaccttcgtcagctacttcgggggctcagggcacaagccgcgctggctgggctggggcgtgctgcttatgggcacggggtcgctggtgttcgcgctgccccacttcacggctggccgctatgaggtggagttggacgcgggtgtcaggacgtgccctgccaaccccggcgcggtgtgtgcggacagcacctcgggcctgtcccgctaccagctggtcttcatgctgggccagttcctgcatggcgtgggtgccacacccctctacacgctgggcgtcacctacctggatgagaacgtcaagtccagctgctcgcccgtctacattgccatcttctacacagcggccatcctgggcccagctgccggctacctgattggaggtgccctgctgaatatctacacggaaatgggccgacggacggagctgaccaccgagagcccactgtgggtcggcgcctggtgggtcggcttcctgggctctggggccgctgctttcttcaccgccgttcccatccttggttaccctcggcagctgccaggctcccagcgctacgcggtcatgagagcggcggaaatgcaccagttgaaggacagcagccgtggggaggcgagcaacccggactttgggaaaaccatcagagacctgcctctctccatctggctcctgctgaagaaccccacgttcatcctgctctgcctggccggggccaccgaggccactctcatcaccggcatgtccacgttcagccccaagttcttggagtcccagttcagcctgagtgcctcagaagctgccaccttgtttgggtacctggtggtgccagcgggtggtggcggcaccttcctgggcggcttctttgtgaacaagctcaggctccggggctccgcggtcatcaagttctgcctgttctgcaccgttgtcagcctgctgggcatcctcgtcttctcactgcactgccccagtgtgcccatggcgggcgtcacagccagctacggcgggagcctcctgcccgaaggccacctgaacctaacggctccctgcaacgctgcctgcagctgccagccagaacactacagccctgtgtgcggctcggacggcctcatgtacttctcactgtgccacgcagggtgccctgcagccacggagacgaatgtggacggccagaaggtgtaccgagactgtagctgtatccctcagaatctttcctctggttttggccatgccactgcagggaaatgcacttcaacttgtcagagaaagcccctccttctggttttcatattcgttgtaattttctttacattcctcagcagcattcctgcactaacggcaactctacgatgtgtccgtgaccctcagagatcctttgccctgggaatccagtggattgtagttagaatactagggggcatcccggggcccatcgccttcggctgggtgatcgacaaggcctgtctgctgtggcaggaccagtgtggccagcagggctcctgcttggtgtaccagaattcggccatgagccgctacatactcatcatggggctcctgtacaaggtgctgggcgtcctcttctttgccatagcctgcttcttatacaagcccctgtcggagtcttcagatggcctggaaacttgtctgcccagccagtcctcagcccctgacagtgccacagatagccagctccagagcagcgtctga

SEQ ID NO: 205 - DNA, 2763 bp, Homo sapiens
ggcacgaggcgctgcgcggcgcggcggccgggccctcgagacggggacggacacaccagcccctcggataccacttggccactcccgctgaggccactcccactgcgtggctgaagcctcgaggtcaccaggcggaggcgcggagatgcccctgcatcagctgggggacaagccgctcaccttccccagccccaactcagccatggaaaacgggcttgaccacaccccacccagcaggagggcatccccgggcacacccctgagccccggctccctccgctccgctgcccatagccccctggacaccagcaagcagcccctctgccagctctgggccgagaagcatggcgcccgggggacccatgaggtgcggtacgtctcggccgggcagagcgtggcgtgcggctggtgggccttcgcaccgccgtgcctgcaggtcctcaacacgcccaagggcatcctgttcttcctgtgtgcggccgcattcctgcaggggatgactgtgaatggcttcatcaacacagtcatcacctccctggagcgccgctatgacctgcacagctaccagagcgggctcatcgccagctcctacgacattgccgcctgcctctgcctcaccttcgtcagctacttcgggggctcagggcacaagccgcgctggctgggctggggcgtgctgcttatgggcacggggtcgctggtgttcgcgctgccccacttcacggctggccgctatgaggtggagttggacgcgggtgtcaggacgtgccctgccaaccccggcgcggtgtgtgcggacagcacctcgggcctgtcccgctaccagctggtcttcatgctgggccagttcctgcatggcgtgggtgccacacccctctacacgctgggcgtcacctacctggatgagaacgtcaagtccagctgctcgcccgtctacattgccatcttctacacagcggccatcctgggcccagctgccggctacctgattggaggtgccctgctgaatatctacacggaaatgggccgacggacggagctgaccaccgagagcccactgtgggtcggcgcctggtgggtcggcttcctgggctctggggccgctgctttcttcaccgccgttcccatccttggttaccctcggcagctgccaggctcccagcgctacgcggtcatgagagcggcggaaatgcaccagttgaaggacagcagccgtggggaggcgagcaacccggactttgggaaaaccatcagagacctgcctctctccatctggctcctgctgaagaaccccacgttcatcctgctctgcctggccggggccaccgaggccactctcatcaccggcatgtccacgttcagccccaagttcttggagtcccagttcagcctgagtgcctcagaagctgccaccttgtttgggtacctggtggtgccagcgggtggtggcggcaccttcctgggcggcttctttgtgaacaagctcaggctccggggctccgcggtcatcaagttctgcctgttctgcaccgttgtcagcctgctgggcatcctcgtcttctcactgcactgccccagtgtgcccatggcgggcgtcacagccagctacggcgggagcctcctgcccgaaggccacctgaacctaacggctccctgcaacgctgcctgcagctgccagccagaacactacagccctgtgtgcggctcggacggcctcatgtacttctcactgtgccacgcagggtgccctgcagccacggagacgaatgtggacggccagaaggtgtaccgagactgtagctgtatccctcagaatctttcctctggttttggccatgccactgcagggaaatgcacttcaacttgtcagagaaagcccctccttctggttttcatattcgttgtaattttctttacattcctcagcagcattcctgcactaacggcaactctacgatgtgtccgtgaccctcagagatcctttgccctgggaatccagtggattgtagttagaatactagggggcatcccggggcccatcgccttcggctgggtgatcgacaaggcctgtctgctgtggcaggaccagtgtggccagcagggctcctgcttggtgtaccagaattcggccatgagccgctacatactcatcatggggctcctgtacaaggtgctgggcgtcctcttctttgccatagcctgcttcttatacaagcccctgtcggagtcttcagatggcctggaaacttgtctgcccagccagtcctcagcccctgacagtgccacagatagccagctccagagcagcgtctgaccaccgcccgcgcccacccggccacggcgggcactcagcatttcctgatgacagaacagtgccgttgggtgatgcaatcacacgggaacttctatttgacctgcaaccttctacttaacctgtggtttaaagtcggctgtgacctcctgtccccagagctgtacggccctgcagtgggtgggaggaacttgcataaatatatatttatggacacacagtttgcatcagaacgtgtttatagaatgtgttttatacccgatcgtgtgtggtgtgcgtgaggacaaactccgcaggggctgtgaatcccactgggagggcggcgggcctgcagcccgaggaaggcttgtgtgtcctcagttaaaactgtgcatatcgaaatatattttgttatttaagcctgcgaaaaaaaaaaaaaaaaaaaaaaaaaaaaaaaaaaaaaaaaaaaaaaa

SEQ ID NO: 206 - DNA, 2750 bp, Homo sapiens; identical to SEQ ID NO: 201

SEQ ID NO: 207 - DNA, 1520 bp, Homo sapiens
gcagagcacagcatcgtcgggaccagactcgtctcaggccagttgcagccttctcagccaaacgccgaccaaggaaaactcactaccatgagaattgcagtgatttgcttttgcctcctaggcatcacctgtgccataccagttaaacaggctgattctggaagttctgaggaaaagcagctttacaacaaatacccagatgctgtggccacatggctaaaccctgacccatctcagaagcagaatctcctagccccacagacccttccaagtaagtccaacgaaagccatgaccacatggatgatatggatgatgaagatgatgatgaccatgtggacagccaggactccattgactcgaacgactctgatgatgtagatgacactgatgattctcaccagtctgatgagtctcaccattctgatgaatctgatgaactggtcactgattttcccacggacctgccagcaaccgaagttttcactccagttgtccccacagtagacacatatgatggccgaggtgatagtgtggtttatggactgaggtcaaaatctaagaagtttcgcagacctgacatccagtaccctgatgctacagacgaggacatcacctcacacatggaaagcgaggagttgaatggtgcatacaaggccatccccgttgcccaggacctgaacgcgccttctgattgggacagccgtgggaaggacagttatgaaacgagtcagctggatgaccagagtgctgaaacccacagccacaagcagtccagattatataagcggaaagccaatgatgagagcaatgagcattccgatgtgattgatagtcaggaactttccaaagtcagccgtgaattccacagccatgaatttcacagccatgaagatatgctggttgtagaccccaaaagtaaggaagaagataaacacctgaaatttcgtatttctcatgaattagatagtgcatcttctgaggtcaattaaaaggagaaaaaatacaatttctcactttgcatttagtcaaaagaaaaaatgctttatagcaaaatgaaagagaacatgaaatgcttctttctcagtttattggttgaatgtgtatctatttgagtctggaaataactaatgtgtttgataattagtttagtttgtggcttcatggaaactccctgtaaactaaaagcttcagggttatgtctatgttcattctatagaagaaatgcaaactatcactgtattttaatatttgttattctctcatgaatagaaatttatgtagaagcaaacaaaatacttttacccacttaaaaagagaatataacattttatgtcactataatcttttgttttttaagttagtgtatattttgttgtgattatctttttgtggtgtgaataaatcttttatcttgaatgtaataagaatttggtggtgtcaattgcttatttgttttcccacggttgtccagcaattaataaaacataaccttttttactgcctaaaaaaaaaaaaaaaa

SEQ ID NO: 208 - DNA, 1524 bp, Homo sapiens
gcagagcacagcatcgtcgggaccagactcgtctcaggccagttgcagccttctcagccaaacgccgaccaaggaaaactcactaccatgagaattgcagtgatttgcttttgcctcctaggcatcacctgtgccataccagttaaacaggctgattctggaagttctgaggaaaagcagctttacaacaaatacccagatgctgtggccacatggctaaaccctgacccatctcagaagcagaatctcctagccccacagacccttccaagtaagtccaacgaaagccatgaccacatggatgatatggatgatgaagatgatgatgaccatgtggacagccaggactccattgactcgaacgactctgatgatgtagatgacactgatgattctcaccagtctgatgagtctcaccattctgatgaatctgatgaactggtcactgattttcccacggacctgccagcaaccgaagttttcactccagttgtccccacagtagacacatatgatggccgaggtgatagtgtggtttatggactgaggtcaaaatctaagaagtttcgcagacctgacatccagtaccctgatgctacagacgaggacatcacctcacacatggaaagcgaggagttgaatggtgcatacaaggccatccccgttgcccaggacctgaacgcgccttctgattgggacagccgtgggaaggacagttatgaaacgagtcagctggatgaccagagtgctgaaacccacagccacaagcagtccagattatataagcggaaagccaatgatgagagcaatgagcattccgatgtgattgatagtcaggaactttccaaagtcagccgtgaattccacagccatgaatttcacagccatgaagatatgctggttgtagaccccaaaagtaaggaagaagataaacacctgaaatttcgtatttctcatgaattagatagtgcatcttctgaggtcaattaaaaggagaaaaaatacaatttctcactttgcatttagtcaaaagaaaaaatgctttatagcaaaatgaaagagaacatgaaatgcttctttctcagtttattggttgaatgtgtatctatttgagtctggaaataactaatgtgtttgataattagtttagtttgtggcttcatggaaactccctgtaaactaaaagcttcagggttatgtctatgttcattctatagaagaaatgcaaactatcactgtattttaatatttgttattctctcatgaatagaaatttatgtagaagcaaacaaaatacttttacccacttaaaaagagaatataacattttatgtcactataatcttttgttttttaagttagtgtatattttgttgtgattatctttttgtggtgtgaataaatcttttatcttgaatgtaataagaatttggtggtgtcaattgcttatttgttttcccacggttgtccagcaattaataaaacataaccttttttactgcctaaaaaaaaaaaaaaaaaaaa

SEQ ID NO: 209 - DNA, 1447 bp, Homo sapiens
gaggcagcagcagcaggaggaggcagacacagcatcgtcgggaccagactcgtctcaggccagttgcagccttctcagccaaacgccgaccaaggaaaactcactaccatgagaattgcagtgatttgcttttgcctcctaggcatcacctgtgccataccagttaaacaggctgattctggaagttctgaggaaaagcagctttacaacaaatacccagatgctgtggccacatggctaaaccctgacccatctcagaagcagaatctcctagccccacagacccttccaagtaagtccaacgaaagccatgaccacatggatgatatggatgatgaagatgatgatgaccatgtggacagccaggactccattgactcgaacgactctgatgatgtagatgacactgatgattctcaccagtctgatgagtctcaccattctgatgaatctgatgaactggtcactgattttcccacggacctgccagcaaccgaagttttcactccagttgtccccacagtagacacatatgatggccgaggtgatagtgtggtttatggactgaggtcaaaatctaagaagtttcgcagacctgacatccagtaccctgatgctacagacgaggacatcacctcacacatggaaagcgaggagttgaatggtgcatacaaggccatccccgttgcccaggacctgaacgcgccttctgattgggacagccgtgggaaggacagttatgaaacgagtcagctggatgaccagagtgctgaaacccacagccacaagcagtccagattatataagcggaaagccaatgatgagagcaatgagcattccgatgtgattgatagtcaggaactttccaaagtcagccgtgaattccacagccatgaatttcacagccatgaagatatgctggttgtagaccccaaaagtaaggaagaagataaacacctgaaatttcgtatttctcatgaattagatagtgcatcttctgaggtcaattaaaaggagaaaaaatacaatttctcactttgcatttagtcaaaagaaaaaatgctttatagcaaaatgaaagagaacatgaaatgcttctttctcagtttattggttgaatgtgtatctatttgagtctggaaataactaatgtgtttgataattagtttagtttgtggcttcatggaaactccctgtaaactaaaagcttcagggttatgtctatgttcattctatagaagaaatgcaaactatcactgtattttaatatttgttattctctcatgaatagaaatttatgtagaagcaaacaaaatacttttacccacttaaaaagagaatataacattttatgtcactataatcttttgttttttaagttagtgtatattttgttgtgattatctttttgtggtgtgaataaatcttttatcttgaatgtaataag

SEQ ID NO: 210 - DNA, 1486 bp, Homo sapiens
agcagcaggaggaggcagagcacagcatcgtcgggaccagactcgtctcaggccagttgcagccttctcagccaaacgccgaccaaggaaaactcactaccatgagaattgcagtgatttgcttttgcctcctaggcatcacctgtgccataccagttaaacaggctgattctggaagttctgaggaaaagcagctttacaacaaatacccagatgctgtggccacatggctaaaccctgacccatctcagaagcagaatctcctagccccacagacccttccaagtaagtccaacgaaagccatgaccacatggatgatatggatgatgaagatgatgatgaccatgtggacagccaggactccattgactcgaacgactctgatgatgtagatgacactgatgattctcaccagtctgatgagtctcaccattctgatgaatctgatgaactggtcactgattttcccacggacctgccagcaaccgaagttttcactccagttgtccccacagtagacacatatgatggccgaggtgatagtgtggtttatggactgaggtcaaaatctaagaagtttcgcagacctgacatccagtaccctgatgctacagacgaggacatcacctcacacatggaaagcgaggagttgaatggtgcatacaaggccatccccgttgcccaggacctgaacgcgccttctgattgggacagccgtgggaaggacagttatgaaacgagtcagctggatgaccagagtgctgaaacccacagccacaagcagtccagattatataagcggaaagccaatgatgagagcaatgagcattccgatgtgattgatagtcaggaactttccaaagtcagccgtgaattccacagccatgaatttcacagccatgaagatatgctggttgtagaccccaaaagtaaggaagaagataaacacctgaaatttcgtatttctcatgaattagatagtgcatcttctgaggtcaattaaaaggagaaaaaatacaatttctcactttgcatttagtcaaaagaaaaaatgctttatagcaaaatgaaagagaacatgaaatgcttctttctcagtttattggttgaatgtgtatctatttgagtctggaaataactaatgtgtttgataattagtttagtttgtggcttcatggaaactccctgtaaactaaaagcttcagggttatgtctatgttcattctatagaagaaatgcaaactatcactgtattttaatatttgttattctctcatgaatagaaatttatgtagaagcaaacaaaatacttttacccacttaaaaagagaatataacattttatgtcactataatcttttgttttttaagttagtgtatattttgttgtgattatctttttgtggtgtgaataaatcttttatcttgaatgtaataagaaaaaaaaaaaaaaaataaaaaaaaaaaaaaaaaaaaaaaaaaaaa

SEQ ID NO: 211 - DNA, 1424 bp, Homo sapiens
gaccagactcgtctcaggccagttgcagccttctcagccaaacgccgaccaaggaaaactcactaccatgagaattgcagtgatttgcttttgcctcctaggcatcacctgtgccataccagttaaacaggctgattctggaagttctgaggaaaagcagctttacaacaaatacccagatgctgtggccacatggctaaaccctgacccatctcagaagcagaatctcctagccccacagaatgctgtgtcctctgaagaaaccaatgactttaaacaagagacccttccaagtaagtccaacgaaagccatgaccacatggatgatatggatgatgaagatgatgatgaccatgtggacagccaggactccattgactcgaacgactctgatgatgtagatgacactgatgattctcaccagtctgatgagtctcaccattctgatgaatctgatgaactggtcactgattttcccacggacctgccagcaaccgaagttttcactccagttgtccccacagtagacacatatgatggccgaggtgatagtgtggtttatggactgaggtcaaaatctaagaagtttcgcagacctgacatccagtaccctgatgctacagacgaggacatcacctcacacatggaaagcgaggagttgaatggtgcatacaaggccatccccgttgcccaggacctgaacgcgccttctgattgggacagccgtgggaaggacagttatgaaacgagtcagctggatgaccagagtgctgaaacccacagccacaagcagtccagattatataagcggaaagccaatgatgagagcaatgagcattccgatgtgattgatagtcaggaactttccaaagtcagccgtgaattccacagccatgaatttcacagccatgaagatatgctggttgtagaccccaaaagtaaggaagaagataaacacctgaaatttcgtatttctcatgaattagatagtgcatcttctgaggtcaattaaaaggagaaaaaatacaatttctcactttgcatttagtcaaaagaaaaaatgctttatagcaaaatgaaagagaacatgaaatgcttctttctcagtttattggttgaatgtgtatctatttgagtctggaaataactaatgtgtttgataattagtttagtttgtggcttcatggaaactccctgtaaactaaaagcttcagggttatgtctatgttcattctatagaagaaatgcaaactatcactgtattttaatatttgttattctctcatgaatagaaatttatgtagaagcaaacaaaatacttttacccacttaaaaagagaatataacattttatgtcactataatcttttgttttttaagttagtgtatattttgttgtgattatctttttgtggtgtgaataa

SEQ ID NO: 212 - DNA, 1499 bp, Homo sapiens
ggggagcagcaggaggaggcagagcacagcatcgtcgggaccagactcgtctcaggccagttgcagccttctcagccaaacgccgaccaaggaaaactcactaccatgagaattgcagtgatttgcttttgcctcctaggcatcacctgtgccataccagttaaacaggctgattctggaagttctgaggaaaagcagctttacaacaaatacccagatgctgtggccacatggctaaaccctgacccatctcagaagcagaatctcctagccccacagaatgctgtgtcctctgaagaaaccaatgactttaaacaagagacccttccaagtaagtccaacgaaagccatgaccacatggatgatatggatgatgaagatgatgatgaccatgtggacagccaggactccattgactcgaacgactctgatgatgtagatgacactgatgattctcaccagtctgatgagtctcaccattctgatgaatctgatgaactggtcactgattttcccacggacctgccagcaaccgaagttttcactccagttgtccccacagtagacacatatgatggccgaggtgatagtgtggtttatggactgaggtcaaaatctaagaagtttcgcagacctgacatccagtaccctgatgctacagacgaggacatcacctcacacatggaaagcgaggagttgaatggtgcatacaaggccatccccgttgcccaggacctgaacgcgccttctgattgggacagccgtgggaaggacagttatgaaacgagtcagctggatgaccagagtgctgaaacccacagccacaagcagtccagattatataagcggaaagccaatgatgagagcaatgagcattccgatgtgattgatagtcaggaactttccaaagtcagccgtgaattccacagccatgaatttcacagccatgaagatatgctggttgtagaccccaaaagtaaggaagaagataaacacctgaaatttcgtatttctcatgaattagatagtgcatcttctgaggtcaattaaaaggagaaaaaatacaatttctcactttgcatttagtcaaaagaaaaaatgctttatagcaaaatgaaagagaacatgaaatgcttctttctcagtttattggttgaatgtgtatctatttgagtctggaaataactaatgtgtttgataattagtttagtttgtggcttcatggaaactccctgtaaactaaaagcttcagggttatgtctatgttcattctatagaagaaatgcaaactatcactgtattttaatatttgttattctctcatgaatagaaatttatgtagaagcaaacaaaatacttttacccacttaaaaagagaatataacattttatgtcactataatcttttgttttttaagttagtgtatattttgttgtgattatctttttgtggtgtgaataaatcttttatcaaaaaaaaaaaaaaaaaaaaaaaaaaa

SEQ ID NO: 213 - DNA, 1476 bp, Homo sapiens
agcagcaggaggaggcagagcacagcatcgtcgggaccagactcgtctcaggccagttgcagccttctcagccaaacgccgaccaaggaaaactcactaccatgagaattgcagtgatttgcttttgcctcctaggcatcacctgtgccataccagttaaacaggctgattctggaagttctgaggaaaagcagctttacaacaaatacccagatgctgtggccacatggctaaaccctgacccatctcagaagcagaatctcctagccccacagaatgctgtgtcctctgaagaaaccaatgactttaaacaagagacccttccaagtaagtccaacgaaagccatgaccacatggatgatatggatgatgaagatgatgacgaccatgtggacagccaggactccattgactcgaacgactctgatgatgtagatgacactgatgattctcaccagtctgatgagtctcaccattctgatgaatctgatgaactggtcactgattttcccacggacctgccagcaaccgaagttttcactccagttgtccccacagtagacacatatgatggccgaggtgatagtgtggtttatggactgaggtcaaaatctaagaagtttcgcagacctgacatccagtaccctgatgctacagacgaggacatcacctcacacatggaaagcgaggagttgaatggtgcatacaaggccatccccgttgcccaggacctgaacgcgccttctgattgggacagccgtgggaaggacagttatgaaacgagtcagctggatgaccagagtgctgaaacccacagccacaagcagtccagattatataagcggaaagctaatgatgagagcaatgagcattccgatgtgattgatagtcaggaactttccaaagtcagccgtgaattccacagccatgaatttcacagccatgaagatatgctggttgtagaccccaaaagtaaggaagaagataaacacctgaaatttcgtatttctcatgaattagatagtgcatcttctgaggtcaattaaaaggagaaaaaatacaatttctcactttgcatttagtcaaaagaaaaaatgctttatagcaaaatggaagagaacatgaaatgcttctttctcagtttattggttgaatgtgtatctatttgagtctggaaataactgatgtgtttgataattagtttagtttgtggcttcatggaaactccctgtaaactaaaagcttcagggttatgtctatgttcattctatagaagaaatgcaaactatcactgtattttaatatttgttattctctcatgaatagaaatttatgtagacgcaaacaaaatacttttacccacttaaaaagaggatataacattttatgtcactataatcttttgttttttaagttagtgtatattttgttgtgattatctttttgtggtgtgaataaatcttttatcttgaatgt

SEQ ID NO: 214 - DNA, 1278 bp, Homo sapiens
gcaggaggaggcagagcacagcatcgtcgggaccagactcgtctcaggccagttgcagccttctcagccaaacgccgaccaaggaaaactcactaccatgagaattgcagtgatttgcttttgcctcctaggcatcacctgtgccataccagttaaacaggctgattctggaagttctgaggaaaagcagctttacaacaaatacccagatgctgtggccacatggctaaaccctgacccatctcagaagcagaatctcctagccccacagaatgctgtgtcctctgaagaaaccaatgactttaaacaagagaccctcccaagtaagtccaacgaaagccatgaccacatggatgatatggatgatgaagatgatgacgaccatgtggacagccaggactccattgactcgaacgactctgatgatgtagatgacactgatgattctcaccagtctgatgagtctcaccattctgatgaatctgatgaactggtcactgattttcccacggacctgccagcaaccgaagttttcactccagttgtccccacagtagacacatatgatggccgaggtgatagtgtggtttatggactgaggtcaaaatctaagaagtttcgcagacctgacatccagtaccctgatgctacagacgaggacatcacctcacacatggaaagcgaggagttgaatggtgcatacaaggccatccccgttgcccaggacctgaacgcgccttctgattgggacagccgtgggaaggacagttatgaaacgagtcagctggatgaccagagtgctgaaacccacagccacaagcagtccagattatataagcggaaagctaatgatgagagcaatgagcattccgatgtgattgatagtcaggaactttccaaagtcagccgtgaattccacagccatgaatttcacagccatgaagatatgctggttgtagaccccaaaagtaaggaagaagataaacacctgaaatttcgtatttctcatgaattagatagtgcatcttctgaggtcaattaaaaggagaaaaaatacaatttctcactttgcatttagtcaaaagaaaaaatgctttatagcaaaatgaaagagaacatgaaatgcttctttctcagtttattggttgaatgtgtatctatttgagtctggaaataactgatgtgtttgataattagtttagtttgtggcttcatggaaactccctgtaaactaaaagcttcagggttatgtctatgttcattctatagaagaaatgc

SEQ ID NO: 215 - DNA, 1549 bp, Homo sapiens
gagcagcaggaggaggcagagcacagcatcgtcgggaccagactcgtctcaggccagttgcagccttctcagccaaacgccgaccaaggaaaactcactaccatgagaattgcagtgatttgcttttgcctcctaggcatcacctgtgccataccagttaaacaggctgattctggaagttctgaggaaaagcagctttacaacaaatacccagatgctgtggccacatggctaaaccctgacccatctcagaagcagaatctcctagccccacagacccttccaagtaagtccaacgaaagccatgaccacatggatgatatggatgatgaagatgatgatgaccatgtggacagccaggactccattgactcgaacgactctgatgatgtagatgacactgatgattctcaccagtctgatgagtctcaccattctgatgaatctgatgaactggtcactgattttcccacggacctgccagcaaccgaagttttcactccagttgtccccacagtagacacatatgatggccgaggtgatagtgtggtttatggactgaggtcaaaatctaagaagtttcgcagacctgacatccagtaccctgatgctacagacgaggacatcacctcacacatggaaagcgaggagttgaatggtgcatacaaggccatccccgttgcccaggacctgaacgcgccttctgattgggacagccgtgggaaggacagttatgaaacgagtcagctggatgaccagagtgctgaaacccacagccacaagcagtccagattatataagcggaaagccaatgatgagagcaatgagcattccgatgtgattgatagtcaggaactttccaaagtcagccgtgaattccacagccatgaatttcacagccatgaagatatgctggttgtagaccccaaaagtaaggaagaagataaacacctgaaatttcgtatttctcatgaattagatagtgcatcttctgaggtcaattaaaaggagaaaaaatacaatttctcactttgcatttagtcaaaagaaaaaatgctttatagcaaaatgaaagagaacatgaaatgcttctttctcagtttattggttgaatgtgtatctatttgagtctggaaataactaatgtgtttgacaattagtttagtttgtggcttcatggaaactccctgtaaactaaaagcttcagggttatgtctatgttcattctatagaagaaatgcaaactatcactgtattttaatatttgttattctctcatgaatagaaatttatgtagaagcaaacaaaatacttttacccacttaaaaagagaatataacattttatgtcactataatcttttgttttttaagttagtgtatattttgttgtgattatctttttgtggtgtgaataaatcttttatcttgaatgtaataagaatttggtggtgtcaattgcttatttgttttcccacggttgtccagcaattaataaaacataaccttttttactgccgcaaaaaaaaaaaaaaaaaaaaaaaaaaaaa

SEQ ID NO: 216 - DNA, 1410 bp, Homo sapiens
agcagcaggaggaggcagagcacagcatcgtcgggaccagactcgtctcaggccagttgcagccttctcagccaaacgccgaccaaggaaaactcactaccatgagaattgcagtgatttgcttttgcctcctaggcatcacctgtgccataccagttaaacaggctgattctggaagttctgaggaaaagcagctttacaacaaatacccagatgctgtggccacatggctaaaccctgacccatctcagaagcagaatctcctagccccacagaatgctgtgtcctctgaagaaaccaatgactttaaacaagagacccttccaagtaagtccaacgaaagccatgaccacatggatgatatggatgatgaagatgatgattctcaccagtctgatgagtctcaccattctgatgaatctgatgaactggtcactgattttcccacggacctgccagcaaccgaagttttcactccagttgtccccacagtagacacatatgatggccgaggtgatagtgtggtttatggactgaggtcaaaatctaagaagtttcgcagacctgacatccagtaccctgatgctacagacgaggacatcacctcacacatggaaagcgaggagttgaatggtgcatacaaggccatccccgttgcccaggacctgaacgcgccttctgattgggacagccgtgggaaggacagttatgaaacgagtcagctggatgaccagagtgctgaaacccacagccacaagcagtccagattatataagcggaaagctaatgatgagagcaatgagcattccgatgtgattgatagtcaggaactttccaaagtcagccgtgaattccacagccatgaatttcacagccatgaagatatgctggttgtagaccccaaaagtaaggaagaagataaacacctgaaatttcgtatttctcatgaattagatagtgcatcttctgaggtcaattaaaaggagaaaaaatacaatttctcactttgcatttagtcaaaagaaaaaatgctttatagcaaaatgaaagagaacatgaaatgcttctttctcagtttattggttgaatgtgtatctatttgagtctggaaataactgatgtgtttgataattagtttagtttgtggcttcatggaaactccctgtaaactaaaagcttcagggttatgtctatgttcattctatagaagaaatgcaaactatcactgtattttaatatttgttattctctcatgaatagaaatttatgtagacgcaaacaaaatacttttacccacttaaaaagagaatataacattttatgtcactataatcttttgttttttaagttagtgtatattttgttgtgattatctttttgtggtgtgaataaatcttttatcttgaatgt

SEQ ID NO: 217 - DNA, 861 bp, Homo sapiens
atgagaattgcagtgatttgcttttgcctcctaggcatcacctgtgccataccagttaaacaggctgattctggaagttctgaggaaaagcagaatgctgtgtcctctgaagaaaccaatgactttaaacaagagacccttccaagtaagtccaacgaaagccatgaccacatggatgatatggatgatgaagatgatgatgaccatgtggacagccaggactccattgactcgaacgactctgatgatgtagatgacactgatgattctcaccagtctgatgagtctcaccattctgatgaatctgatgaactggtcactgattttcccacggacctgccagcaaccgaagttttcactccagttgtccccacagtagacacatatgatggccgaggtgatagtgtggtttatggactgaggtcaaaatctaagaagtttcgcagacctgacatccagtaccctgatgctacagacgagcacatcacctcacacatggaaagcgaggagttgaatggtgcatacaaggccatccccgttgcccaggacctgaacgcgccttctgattgggacagccgtgggaaggacagttatgaaacgagtcagctggatgaccagagtgctgaagcccacagccacaagcagtccagattatataagcggaaagctaatgatgagagcaatgagcattccgatgtgattgatagtcaggaactttccaaagtcagccgtgaattccacagccatgaatttcacagccatgaagatatgctggttgtagaccccaaaagtaaggaagaagataaacacctgaaatttcgtatttctcatgaattagatagtgcatcttctgaggtcaat

SEQ ID NO: 218 - DNA, 900 bp, Homo sapiens
atgagaattgcagtgatttgcttttgcctcctaggcatcacctgtgccataccagttaaacaggctgattctggaagttctgaggaaaagcagctttacaacaaatacccagatgctgtggccacatggctaaaccctgacccatctcagaagcagaatctcctagccccagagacccttccaagtaagtccaacgaaagccatgaccacatggatgatatggatgatgaagatgatgatgaccatgtggacagccaggactccattgactcgaacgactctgatgatgtagatgacactgatgattctcaccagtctgatgagtctcaccattctgatgaatctgatgaactggtcactgattttcccacggacctgccagcaaccgaagttttcactccagttgtccccacagtagacacatatgatggccgaggtgatagtgtggtttatggactgaggtcaaaatctaagaagtttcgcagacctgacatccagtaccctgatgctacagacgagcacatcacctcacacatggaaagcgaggagttgaatggtgcatacaaggccatccccgttgcccaggacctgaacgcgccttctgattgggacagccgtgggaaggacagttatgaaacgagtcagctggatgaccagagtgctgaagcccacagccacaagcagtccagattatataagcggaaagctaatgatgagagcaatgagcattccgatgtgattgatagtcaggaactttccaaagtcagccgtgaattccacagccatgaatttcacagccatgaagatatgctggttgtagaccccaaaagtaaggaagaagataaacacctgaaatttcgtatttctcatgaattagatagtgcatcttctgaggtcaat

SEQ ID NO: 219 - DNA, 942 bp, Homo sapiens
atgagaattgcagtgatttgcttttgcctcctaggcatcacctgtgccataccagttaaacaggctgattctggaagttctgaggaaaagcagctttacaacaaatacccagatgctgtggccacatggctaaaccctgacccatctcagaagcagaatctcctagccccacagaatgctgtgtcctctgaagaaaccaatgactttaaacaagagacccttccaagtaagtccaacgaaagccatgaccacatggatgatatggatgatgaagatgatgatgaccatgtggacagccaggactccattgactcgaacgactctgatgatgtagatgacactgatgattctcaccagtctgatgagtctcaccattctgatgaatctgatgaactggtcactgattttcccacggacctgccagcaaccgaagttttcactccagttgtccccacagtagacacatatgatggccgaggtgatagtgtggtttatggactgaggtcaaaatctaagaagtttcgcagacctgacatccagtaccctgatgctacagacgagcacatcacctcacacatggaaagcgaggagttgaatggtgcatacaaggccatccccgttgcccaggacctgaacgcgccttctgattgggacagccgtgggaaggacagttatgaaacgagtcagctggatgaccagagtgctgaagcccacagccacaagcagtccagattatataagcggaaagctaatgatgagagcaatgagcattccgatgtgattgatagtcaggaactttccaaagtcagccgtgaattccacagccatgaatttcacagccatgaagatatgctggttgtagaccccaaaagtaaggaagaagataaacacctgaaatttcgtatttctcatgaattagatagtgcatcttctgaggtcaat

SEQ ID NO: 220 - DNA, 998 bp, Homo sapiens
gcggcgggcgcagacagcggcgggcgcaggacgtgcactatggctcggggctcgctgcgccggttgctgcggctcctcgtgctggggctctggctggcgttgctgcgctccgtggccggggagcaagcgccaggcaccgccccctgctcccgcggcagctcctggagcgcggacctggacaagtgcatggactgcgcgtcttgcagggcgcgaccgcacagcgacttctgcctgggctgcgctgcagcacctcctgcccccttccggctgctttggcccatccttgggggcgctctgagcctgaccttcgtgctggggctgctttctggctttttggtctggagacgatgccgcaggagagagaagttcaccacccccatagaggagaccggcggagagggctgcccagctgtggcgctgatccagtgacaatgtgccccctgccagccggggctcgcccactcatcattcattcatccattctagagccagtctctgcctcccagacgcggcgggagccaagctcctccaaccacaaggggggtggggggcggtgaatcacctctgaggcctgggcccagggttcaggggaaccttccaaggtgtctggttgccctgcctctggctccagaacagaaagggagcctcacgctggctcacacaaaacagctgacactgactaaggaactgcagcatttgcacaggggaggggggtgccctccttccttaggacctgggggccaggctgacttggggggcagacttgacactaggccccactcactcagatgtcctgaaattccaccacgggggtcaccctggggggttagggacctatttttaacactaggggctggcccactaggagggctggccctaagatacagacccccccaactccccaaagcggggaggagatatttattttggggagagtttggaggggagggagaatttattaataaaagaatctttaactttaaaaaaaaaaaaaaaaa

SEQ ID NO: 221 - DNA, 998 bp, Homo sapiens; identical to SEQ ID NO: 220

SEQ ID NO: 222 - DNA, 986 bp, Homo sapiens
cagacagcggcgggcgcaggacgtgcactatggctcggggctcgctgcgccggttgctgcggctcctcgtgctggggctctggctggcgttgctgcgctccgtggccggggagcaagcgccaggcaccgccccctgctcccgcggcagctcctggagcgcggacctggacaagtgcatggactgcgcgtcttgcagggcgcgaccgcacagcgacttctgcctgggctgcgctgcagcacctcctgcccccttccggctgctttggcccatccttgggggcgctctgagcctgaccttcgtgctggggctgctttctggctttttggtctggagacgatgccgcaggagagagaagttcaccacccccatagaggagaccggcggagagggctgcccagctgtggcgctgatccagtgacaatgtgccccctgccagccggggctcgcccactcatcattcattcatccattctagagccagtctctgcctcccagacgcggcgggagccaagctcctccaaccacaaggggggtggggggcggtgaatcacctccgaggcctgggtccagggttcaggggaaccttccaaggtgtctggttgccctgcctctggctccagaacagaaagggagcctcacgctggctcacacaaaacagctgacactgactaaggaactgcagcatttgcacaggggaggggggtgccctccttcctagaggccctgggggccaggctgacttggggggcagacttgacactaggccccactcactcagatgtcctgaaattccaccacgggggtcaccctggggggttagggacctatttttaacactagggggctggcccactaggagggctggccctaagatacagacccccccaactccccaaagcggggaggagatatttattttggggagagtttggaggggagggagaatttattaataaaagaatctttaactttaaaaaaaaaaaaa

SEQ ID NO: 223 - DNA, 893 bp, Homo sapiens
gcggcgggcgcagacagcggcgggcgcaggacgtgcactatggctcggggctcgctgcgccggttgctgcggctcctcgtgctggggctctggctggcgttgctgcgctccgtggccggggagcaagcgccaggcgctgcagcacctcctgcccccttccggctgctttggcccatccttgggggcgctctgagcctgaccttcgtgctggggctgctttctggctttttggtctggagacgatgccgcaggagagagaagttcaccacccccatagaggagaccggcggagagggctgcccagctgtggcgctgatccagtgacaatgtgccccctgccagccggggctcgcccactcatcattcattcatccattctagagccagtctctgcctcccagacgcggcgggagccaagctcctccaaccacaaggggggtggggggcggtgaatcacctctgaggcctgggcccagggttcaggggaaccttccaaggtgtctggttgccctgcctctggctccagaacagaaagggagcctcacgctggctcacacaaaacagctgacactgactaaggaactgcagcatttgcacaggggaggggggtgccctccttccttaggacctgggggccaggctgacttggggggcagacttgacactaggccccactcactcagatgtcctgaaattccaccacgggggtcaccctggggggttagggacctatttttaacactaggggctggcccactaggagggctggccctaagatacagacccccccaactccccaaagcggggaggagatatttattttggggagagtttggaggggagggagaatttattaataaaagaatctttaactttaaaaaaaaaaaaaaaaa

SEQ ID NO: 224 - DNA, 1028 bp, Homo sapiens
ggcacgagggtgggtccctgccggccggcggcgggcgcagacagcggcgggcgcaggacgtgcactatggctcggggctcgctgcgccggttgctgcggctcctcgtgctggggctctggctggcgttgctgcgctccgtggccggggagcaagcgccaggcaccgccccctgctcccgcggcagctcctggagcgcggacctggacaagtgcatggactgcgcgtcttgcagggcgcgaccgcacagcgacttctgcctgggctgcgctgcagcacctcctgcccccttccggctgctttggcccatccttgggggcgctctgagcctgaccttcgtgctggggctgctttctggctttttggtctggagacgatgccgcaggagagagaagttcaccacccccatagaggagaccggcggagagggctgcccagctgtggcgctgatccagtgacaatgtgccccctgccagccggggctcgcccactcatcattcattcatccattctagagccagtctctgcctcccagacgcggcgggagccaagctcctccaaccacaaggggggtggggggcggtgaatcacctctgaggcctgggcccagggttcaggggaaccttccaaggtgtctggttgccctgcctctggctccagaacagaaagggagcctcacgctggctcacacaaaacagctgacactgactaaggaactgcagcatttgcacaggggaggggggtgccctccttcctagaggccctgggggccaggctgacttggggggcagacttgacactaggccccactcactcagatgtcctgaaattccaccacgggggtcaccctggggggttagggacctatttttaacactagggggctggcccactaggagggctggccctaagatacagacccccccaactccccaaagcggggaggagatatttattttggggagagtttggaggggagggagaatttattaataaaagaatctttaactttaaaaaaaaaaaaaaaaaa

SEQ ID NO: 225 - DNA, 1806 bp, Homo sapiens
cgtgcactatggctcggggctcgctgcgccggttgctgcggctcctcgtgctggggctctggctggcgttgctgcgctccgtggccggggagcaagcgccaggtacgcgggactccggggtcggggaaccccgggccggggctcgggagccggactgggtgtctggagaacagcgccgaactgggggaacaggcggatgtggggatctggggtcaggtggccttcaaacagctcgctcccggctgtgggaagttccatcactctccaagcttcattcacaatccgggcctcagtttctcccaccgtccaattggggttggggggggtcttcagttccacaagtccgaagtacttcgaatggagagagaaagtgagtgagggcgggatgtttagtctaggaaggggcacgcccccagcctggtccgtacagggtctaactagccccagtgatcgacgagttggggaggccgtcgagaggcactagggtctgtgccctctataccatgtggggtgcccccttccatccggtgacttcagtgcccagctatgcggggggagggactggggtcgggcccggtgcccaggagtgagtcacccgccggcggcaggggggttgtggggacctgaccccccccacccccagcgtcccgcgctacgccctccctcccggagctgccgtgtcccggtcgggccgtgcggtcacctgtgaggaatgcgcggggagggcgccggtgactcacgttattcgagccggccgaccctgacctcagaccccagaatagccgagtcccgcccccagcctctgacccgaggccccctccccaggcaccgccccctgctcccgcggcagctcctggagcgcggacctggacaagtgcatggactgcgcgtcttgcagggcgcgaccgcacagcgacttctgcctgggctgcgctgcagcacctcctgcccccttccggctgctttggcccatccttgggggcgctctgagcctgaccttcgtgctggggctgctttctggctttttggtctggagacgatgccgcaggagagagaagttcaccacccccatagaggagaccggcggagagggctgcccagctgtggcgctgatccagtgacaatgtgccccctgccagccggggctcgcccactcatcattcattcatccattctagagccagtctctgcctcccagacgcggcgggagccaagctcctccaaccacaaggggggtggggggcggtgaatcacctctgaggcctgggcccagggttcaggggaaccttccaaggtgtctggttgccctgcctctggctccagaacagaaagggagcctcacgctggctcacacaaaacagctgacactgactaaggaactgcagcatttgcacaggggaggggggtgccctccttcctagaggccctgggggccaggctgacttggggggcagacttgacactaggccccactcactcagatgtcctgaaattccaccacgggggtcaccctggggggttagggacctatttttaacactagggggctggcccactaggagggctggccctaagatacagacccccccaactccccaaagcggggaggagatatttattttggggagagtttggagaggagggagaatttattaataaaagaatctttaactttaaaaaaaaaaaaaaaaaaaaaaaaaaaaaaaaaaaaaaaaaaaaaaaaaaaaaaaaaaaaaaaaaaaaaaaaaaaaaaaaaaaaaaaaaaaaaaaaaaaaaaaaaaaaaaaaaaaaaaaaaaaaaaaaaaa

SEQ ID NO: 226 - DNA, 1372 bp, Homo sapiens
gcacgagggcgcttttgtctccggtgagttttgtggcgggaagcttctgcgctggtgcttagtaaccgactttcctccggactcctgcacgacctgctcctacagccggcgatccactcccggctgttcccccggagggtccagaggcctttcagaaggagaaggcagctctgtttctctgcagaggagtagggtcctttcagccatgaagcatgtgttgaacctctacctgttaggtgtggtactgaccctactctccatcttcgttagagtgatggagtccctagaaggcttactagagagcccatcgcctgggacctcctggaccaccagaagccaactagccaacacagagcccaccaagggccttccagaccatccatccagaagcatgtgataagacctccttccatactggccatattttggaacactgacctagacatgtccagatgggagtcccattcctagcagacaagctgagcaccgttgtaaccagagaactattactaggccttgaagaacctgtctaactggatgctcattgcctgggcaaggcctgtttaggccggttgcggtggctcatgcctgtaatcctagcactttgggaggctgaggtgggtggatcacctgaggtcaggagttcgagaccagcctcgccaacatggcgaaaccccatctctactaaaaatacaaaagttagctgggtgtggtggcagaggcctgtaatcccagttccttgggaggctgaggcgggagaattgcttgaacccggggacggaggttgcagtgaaccgagatcgcactgctgtacccagcctgggccacagtgcaagactccatctcaaaaaaaaaaagaaaagaaaaagcctgtttaatgcacaggtgtgagtggattgcttatggctatgagataggttgatctcgcccttaccccggggtctggtgtatgctgtgctttcctcagcagtatggctctgacatctcttagatgtcccaacttcagctgttgggagatggtgatattttcaaccctacttcctaaacatctgtctggggttcctttagtcttgaatgtcttatgctcaattatttggtgttgagcctctcttccacaagagctcctccatgtttggatagcagttgaagaggttgtgtgggtgggctgttgggagtgaggatggagtgttcagtgcccatttctcattttacattttaaagtcgttcctccaacatagtgtgtattggtctgaagggggtggtgggatgccaaagcctgctcaagttatggacattgtggccaccatgtggcttaaatgattttttctaactaataaagtggaatatatatttcaaaaaaaaaaaaaaaaaa

SEQ ID NO: 227 - DNA, 1372 bp, Homo sapiens; identical to SEQ ID NO: 226

SEQ ID NO: 228 - DNA, 859 bp, Homo sapiens
ctccggtgagttttgtggcgggaagcttctgcgctggtgcttagtaaccgactttcctccggactcctgcacgacctgctcctacagccggcgatccactcccggctgttcccccggagggtccagaggcctttcagaaggagaaggcagctctgtttctctgcagaggagtagggtcctttcagccatgaagcatgtgttgaacctctacctgttaggtgtggtactgaccctactctccatcttcgttagagtgatggagtccctagagggcttactagagagcccatcgcctgggacctcctggaccaccagaagccaactagccaacacagagcccaccaagggccttccagaccatccatccagaagcatgtgataagacctccttccatactggccatattttggaacactgacctagacatgtccagatgggagtcccattcctagcagacaagctgagcaccgttgtaaccagagaactattactaggccttgaagaacctgtctaactggatgctcattgcctgggcaaggcctgtttaggccggttgcggtggctcatgcctgtaatcctagcactttgggaggctgaggtgggtggatcacctgaggtcaggagttcgagaccagcctcgccaacatggcgaaaccccatctctactaaaaatacaaaagttagctgggtgtggtggcagaggcctgtaatcccagctccttgggaggctgaggcgggagaattgcttgaacccggggacggaggttgcagtgagccgagatcgcactgctgtacccagcctgggccacagtgcaagactccatctcaaaaaaaaaaaaaaaaaaaaaaaaaaaaaaa

SEQ ID NO: 229 - DNA, 857 bp, Homo sapiens
gcttttgtttccggtgagttttgtggcgggaagcttctgcgctggtgcttagtaaccgactttcctccggactcctgcacgacctgctcctacagccggcgatccactcccggctgttcccccggagggtccagaggcctttcagaaggagaaggcagctctgtttctctgcagaggagtagggtcctttcagccatgaagcatgtgttgaacctctacctgttaggtgtggtactgaccctactctccatcttcactagagtgatggagtccctagagggcttactagagagcccatcgcctgggacctcctggaccaccagaagccaactagccaacacagagcccaccaagggccttccagaccatccatccagaagcatgtgataagacctccttccatactggccatattttggaacactgacctagacatgtccagatgggagtcccactcctagcagacaagctgagcaccgttgtaaccagagaactattactaggccttgaagaacctgtctaactggatgctcattgcctgggcaaggcctgtttaggccggttgcggtggctcatgcctgtaatcctagcactttgggaggctgaggtgggtggatcacctgaggtcaggagttcgagaccagcctcgccaacatggcgaaaccccatctctactaaaaatacaaaagttagctgggtgtggtggcagaggcctgtaatcccagctccttgggaggctgaggcgggagaattgcttgaacccggggacggaggttgcagtgagccgagatcgcactgctgtacccagcctgggccacagtgcaagactccatctcaaaaaaaaaaaaaaaaaaaaa

SEQ ID NO: 230 - DNA, 897 bp, Homo sapiens
atggtaagaatggtgcctgtcctgctgtctctgctgctgcttctgggtcctgctgtcccccaggagaaccaagatggtcgttactctctgacctatatctacactgggctgtccaagcatgttgaagacgtccccgcgtttcaggcccttggctcactcaatgacctccagttctttagatacaacagtaaagacaggaagtctcagcccatgggactctggagacaggtggaaggaatggaggattggaagcaggacagccaacttcagaaggccagggaggacatctttatggagaccctgaaagacattgtggagtattacaacgacagtaacgggtctcacgtattgcagggaaggtttggttgtgagatcgagaataacagaagcagcggagcattctggaaatattactatgatggaaaggactacattgaattcaacaaagaaatcccagcctgggtccccttcgacccagcagcccagataaccaagcagaagtgggaggcagaaccagtctacgtgcagcgggccaaggcttacctggaggaggagtgccctgcgactctgcggaaatacctgaaatacagcaaaaatatcctggaccggcaagatcctccctctgtggtggtcaccagccaccaggccccaggagaaaagaagaaactgaagtgcctggcctacgacttctacccagggaaaattgatgtgcactggactcgggccggcgaggtgcaggagcctgagttacggggagatgttcttcacaatggaaatggcacttaccagtcctgggtggtggtggcagtgcccccgcaggacacagccccctactcctgccacgtgcagcacagcagcctggcccagcccctcgtggtgccctgggaggccagctag

SEQ ID NO: 231 - DNA, 1166 bp, Homo sapiens
gcaagaatggtgcctgtcctgctgtctctgctgctgcttctgggtcctgctgtcccccaggagaaccaagatggtcgttactctctgacctatatctacactgggctgtccaagcatgttgaagacgtccccgcgtttcaggcccttggctcactcaatgacctccagttctttagatacaacagtaaagacaggaagtctcagcccatgggactctggagacaggtggaaggaatggaggattggaagcaggacagccaacttcagaaggccagggaggacatctttatggagaccctgaaagacattgtggagtattacaacgacagtaacgggtctcacgtattgcagggaaggtttggttgtgagatcgagaataacagaagcagcggagcattctggaaatattactatgatggaaaggactacattgaattcaacaaagaaatcccagcctgggtccccttcgacccagcagcccagataaccaagcagaagtgggaggcagaaccagtctacgtgcagcgggccaaggcttacctggaggaggagtgccctgcgactctgcggaaatacctgaaatacagcaaaaatatcctggaccggcaagatcctccctctgtggtggtcaccagccaccaggccccaggagaaaagaagaaactgaagtgcctggcctacgacttctacccagggaaaattgatgtgcactggactcgggccggcgaggtgcaggagcctgagttacggggagatgttcttcacaatggaaatggcacttaccagtcctgggtggtggtggcagtgcccccgcaggacacagccccctactcctgccacgtgcagcacagcagcctggcccagcccctcgtggtgccctgggaggccagctaggaagcaagggttggaggcaatgtgggatctcagacccagtagctgcccttcctgcctgatgtgggagctgaaccacagaaatcacagtcaatggatccacaaggcctgaggagcagtgtggggggacagacaggaggtggatttggagaccgaagactgggatgcctgtcttgagtagacttggacccaaaaaatcatctcaccttgagcccacccccaccccattgtctaatctgtagaagctaataaataatcatccctccttgcctagc

SEQ ID NO: 232 - DNA, 1234 bp, Homo sapiens
ccacgcgtccgcctgcccagaaccctccaagcagacacaatggtaagaatggtgcctgtcctgctgtctctgctgctgcttctgggtcctgctgtcccccaggagaaccaagatggtcgttactctctgacctatatctacactgggctgtccaagcatgttgaagacgtccccgcgtttcaggcccttggctcactcaatgacctccagttctttagatacaacagtaaagacaggaagtctcagcccatgggactctggagacaggtggaaggaatggaggattggaagcaggacagccaacttcagaaggccagggaggacatctttatggagaccctgaaagacattgtggagtattacaacgacagtaacgggtctcacgtattgcagggaaggtttggttgtgagatcgagaataacagaagcagcggagcattctggaaatattactatgatggaaaggactacattgaattcaacaaagaaatcccagcctgggtccccttcgacccagcagcccagataaccaagcagaagtgggaggcagaaccagtctacgtgcagcgggccaaggcttacctggaggaggagtgccctgcgactctgcggaaatacctgaaatacagcaaaaatatcctggaccggcaagatcctccctctgtggtggtcaccagccaccaggccccaggagaaaagaagaaactgaagtgcctggcctacgacttctacccagggaaaattgatgtgcactggactcgggccggcgaggtgcaggagcctgagttacggggagatgttcttcacaatggaaatggcacttaccagtcctgggtggtggtggcagtgcccccgcaggacacagccccctactcctgccacgtgcagcacagcagcctggcccagcccctcgtggtgccctgggaggccagctaggaagcaagggttggaggcaatgtgggatctcagacccagtagctgcccttcctgcctgatgtgggagctgaaccacagaaatcacagtcaatggatccacaaggcctgaggagcagtgtggggggacagacaggaggtggatttggagaccgaagactgggatgcctgtcttgagtagacttggacccaaaaaatcatctcaccttgagcccacccccaccccattgtctaatctgtagaagctaataaataatcatccctccttgcctagcaaaaaaaaaaaaaaaaaaaaaaaaaa

SEQ ID NO: 233 - DNA, 497 bp, Homo sapiens
aaccctccaagcagacacaatggtaagaatggtgcctgtcctgctgtctctgctgctgcttctgggtcctgctgtcccccaggagaaccaagatggtcgttactctctgacctatatctacactgggctgtccaagcatgttgaagacgtccccgcgtttcaggcccttggctcactcaatgacctccagttctttagatacaacagtaaagacaggaagtctcagcccatgggactctggagacaggtggaaggaatggaggattggaagcaggacagccaacttcagaaggccagggaggacatctttatggagaccctgaaagacattgtggagtattacaacgacagtaacgggtctcacgtattgcagggaaggtttggttgtgagatcgagaataacagaagcagcggagcattctggaaatattactatgatggaaaggactacattgaattcaacaaagaaaaaaaaaaaaaaaaaaaaaaaaaaaaaa

SEQ ID NO: 234 - DNA, 1208 bp, Homo sapiens
aagcagacacaatggtaagaatggtgcctgtcctgctgtctctgctgctgcttctgggtcctgctgtcccccaggagaaccaagatggtcgttactctctgacctatgtctacactgggctgtccaagcatgttgaagacgtccccgcgtttcaggcccttggctcactcaatgacctccagttctttagatacaacagtaaagacaggaagtctcagcccatgggactctggagacaggtggaaggaatggaggattggaagcaggacagccaacttcagaaggccagggaggacatctttatggagaccctgaaagacatcgtggagtattacaacgacagtaacgggtctcacgtattgcagggaaggtttggttgtgagatcgagaataacagaagcagcggagcattctggaaatattactatgatggaaaggactacattgaattcaacaaagaaatcccagcctgggtccccttcgacccagcagcccagataaccaagcagaagtgggaggcagaaccagtctacgtgcagcgggccaaggcttacctggaggaggagtgccctgcgactctgcggaaatacctgaaatacagcaaaaatatcctggaccggcaagatcctccctctgtggtggtcaccagccaccaggccccaggagaaaagaagaaactgaagtgcctggcctacgacttctacccagggaaaattgatgtgcactggactcgggccggcgaggtgcaggagcctgagttacggggagatgttcttcacaatggaaatggcacttaccagtcctgggtggtggtggcagtgcccccgcaggacacagccccctactcctgccacgtgcagcacagcagcctggcccagcccctcgtggtgccctgggaggccagctaggaagcaagggttggaggcaatgtgggatctcagacccagtagctgcccttcctgcctgatgtgggagctgaaccacagaaatcacagtcaatggatccacaaggcctgaggagcagtgtggggggacagacaggaggtggatttggagaccgaagactgggatgcctgtcttgagtagacttggacccaaaaaatcatctcaccttgagcccacccccaccccattgtctaatctgtagaagctaataaataatcatccctccttgcctagcaaaaaaaaaaaaaaaaaaaaaaaaaaaa

SEQ ID NO: 235 - DNA, 1195 bp, Homo sapiens
cctggggacaatgtgggcttcaatgtcaagaatgttgcctgtcctgctgtctctgctgctgcttctgggtcctgctgtcccccaggagaaccaagatggtcgttactctctgacctatatctacactgggctgtccaagcatgttgaagacgtccccgcgtttcaggcccttggctcactcaatgacctccagttctttagatacaacagtaaagacaggaagtctcagcccatgggactctggagacaggtggaaggaatggaggattggaagcaggacagccaacttcagaaggccagggaggacatctttatggagaccctgaaagacattgtggagtattacaacgacagtaacgggtctcacgtattgcagggaaggtttggttgtgagatcgagaataacagaagcagcggagcattctggaaatattactatgatggaaaggactacattgaattcaacaaagaaatcccagcctgggtccccttcgacccagcagcccagataaccaagcagaagtgggaggcagaaccagtctacgtgcagcgggccaaggcttacctggaggaggagtgccctgcgactctgcggaaatacctgaaatacagcaaaaatatcctggaccggcaagatcctccctctgtggtggtcaccagccaccaggccccaggagaaaagaagaaactgaagtgcctggcctacgacttctacccagggaaaattgatgtgcactggactcgggccggcgaggtgcaggagcctgagttacggggagatgttcttcacaatggaaatggcacttaccagtcctgggtggtggtggcagtgcccccgcaggacacagccccctactcctgccacgtgcagcacagcagcctggcccagcccctcgtggtgccctgggaggccagctaggaagcaagggttggaggcaatgtgggatctcagacccagtagctgcccttcctgcctgatgtgggagctgaaccacagaaatcacagtcaatggatccacaaggcctgaggagcagtgtggggggacagacaggaggtggatttggagaccgaagactgggatgcctgtcttgagtagacttggacccaaaaaatcatctcaccttgagcccacccccaccccattgtctaatctgtagaagctaataaataatcatccctccttaaaaaaaaaaa

SEQ ID NO: 236 - DNA, 1166 bp, Homo sapiens; identical to SEQ ID NO: 231

SEQ ID NO: 237 - DNA, 1925 bp, Homo sapiens
agtggagtgggacaggtatataaaggaagtacagggcctggggaagaggccctgtctaggtagctggcaccaggagccgtgggcaagggaagaggccacaccctgccctgctctgctgcagccagaatgggtgtgaaggcgtctcaaacaggctttgtggtcctggtgctgctccagtgctgctctgcatacaaactggtctgctactacaccagctggtcccagtaccgggaaggcgatgggagctgcttcccagatgcccttgaccgcttcctctgtacccacatcatctacagctttgccaatataagcaacgatcacatcgacacctgggagtggaatgatgtgacgctctacggcatgctcaacacactcaagaacaggaaccccaacctgaagactctcttgtctgtcggaggatggaactttgggtctcaaagattttccaagatagcctccaacacccagagtcgccggactttcatcaagtcagtaccgccattcctgcgcacccatggctttgatgggctggaccttgcctggctctaccctggacggagagacaaacagcattttaccaccctaatcaaggaaatgaaggccgaatttataaaggaagcccagccagggaaaaagcagctcctgctcagcgcagcactgtctgcggggaaggtcaccattgacagcagctatgacattgccaagatatcccaacacctggatttcattagcatcatgacctacgattttcatggagcctggcgtgggaccacaggccatcacagtcccctgttccgaggtcaggaggatgcaagtcctgacagattcagcaacactgactatgctgtggggtacatgttgaggctgggggctcctgccagtaagctggtgatgggcatccccaccttcgggaggagcttcactctggcttcttctgagactggtgttggagccccaatctcaggaccgggaattccaggccggttcaccaaggaggcagggacccttgcctactatgagatctgtgacttcctccgcggagccacagtccatagaaccctcggccagcaggtcccctatgccaccaagggcaaccagtgggtaggatacgacgaccaggaaagcgtcaaaagcaaggtgcagtacctgaaggataggcagctggcaggcgccatggtatgggccctggacctggatgacttccagggctccttctgcggccaggatctgcgcttccctctcaccaatgccatcaaggatgcactcgctgcaacgtagccctctgttctgcacacagcacgggggccaaggatgccccgtccccctctggctccagctggccgggagcctgatcacctgccctgctgagtcccaggctgagcctcagtctccctcccttggggcctatgcagaggtccacaacacacagatttgagctcagccctggtgggcagagaggtagggatggggctgtggggatagtgaggcatcgcaatgtaagactcgggattagtacacacttgttgatgattaatggaaatgtttacagatccccaagcctggcaagggaatttcttcaactccctgccccctagccctccttatcaaaggacaccattttggcaagctctatcaccaaggagccaaacatcctacaagacacagtgaccatactaattataccccctgcaaagccagcttgaaaccttcacttaggaacgtaatcgtgtcccctatcctacttccccttcctaattccacagctgctcaataaagtacaagagtttaacagtgtgttggcgctttgctttggtctatctttgagcgcccactagacccactggactcacctcccccatctcttctgggttccttcctctgagccttgggacccctgagcttgcagagatgaaggccgccatgtt

SEQ ID NO: 238 - DNA, 1741 bp, Homo sapiens
ctaggtagctggcaccaggagccgtgggcaagggaagaggccacaccctgccctgctctgctgcagccagaatgggtgtgaaggcgtctcaaacaggctttgtggtcctggtgctgctccagtgctgctctgcatacaaactggtctgctactacaccagctggtcccagtaccgggaaggcgatgggagctgcttcccagatgcccttgaccgcttcctctgtacccacatcatctacagctttgccaatataagcaacgatcacatcgacacctgggagtggaatgatgtgacgctctacggcatgctcaacacactcaagaacaggaaccccaacctgaagactctcttgtctgtcggaggatggaactttgggtctcaaagattttccaagatagcctccaacacccagagtcgccggactttcatcaagtcagtaccgccattcctgcgcacccatggctttgatgggctggaccttgcctggctctaccctggacggagagacaaacagcattttaccaccctaatcaaggaaatgaaggccgaatttataaaggaagcccagccagggaaaaagcagctcctgctcagcgcagcactgtctgcggggaaggtcaccattgacagcagctatgacattgccaagatatcccaacacctggatttcattagcatcatgacctacgattttcatggagcctggcgtgggaccacaggccatcacagtcccctgttccgaggtcaggaggatgcaagtcctgacagattcagcaacactgactatgctgtggggtacatgttgaggctgggggctcctgccagtaagctggtgatgggcatccccaccttcgggaggagcttcactctggcttcttctgagactggtgttggagccccaatctcaggaccgggaattccaggccggttcaccaaggaggcagggacccttgcctactatgagatctgtgacttcctccgcggagccacagtccatagaaccctcggccagcaggtcccctatgccaccaagggcaaccagtgggtaggatacgacgaccaggaaagcgtcaaaagcaaggtgcagtacctgaaggataggcagctggcaggcgccatggtatgggccctggacctggatgacttccagggctccttctgcggccaggatctgcgcttccctctcaccaatgccatcaaggatgcactcgctgcaacgtagccctctgttctgcacacagcacgggggccaaggatgccccgtccccctctggctccagctggccgggagcctgatcacctgccctgctgagtcccaggctgagcctcagtctccctcccttggggcctatgcagaggtccacaacacacagatttgagctcagccctggtgggcagagaggtagggatggggctgtggggatagtgaggcatcgcaatgtaagactcgggattagtacacacttgttgatgattaatggaaatgtttacagatccccaagcctggcaagggaatttcttcaactccctgccccctagccctccttatcaaaggacaccattttggcaagctctatcaccaaggagccaaacatcctacaagacacagtgaccatactaattataccccctgcaaagccagcttgaaaccttcacttaggaacgtaatcgtgtcccctatcctacttccccttcctaattccacagctgctcaataaagtacaagagtttaacagtgtg

SEQ ID NO: 239 - DNA, 1801 bp, Homo sapiens
ggacaggtatataaaggaagtacagggcctggggaagaggccctgtctaggtagctggcaccaggagccgtgggcaagggaagaggccacaccctgccctgctctgctgcagccagaatgggtgtgaaggcgtctcaaacaggctttgtggtcctggtgctgctccagtgctgctctgcatacaaactggtctgctactacaccagctggtcccagtaccgggaaggcgatgggagctgcttcccagatgcccttgaccgcttcctctgtacccacatcatctacagctttgccaatataagcaacgatcacatcgacacctgggagtggaatgatgtgacgctctacggcatgctcaacacactcaagaacaggaaccccaacctgaagactctcttgtctgtcggaggatggaactttgggtctcaaagattttccaagatagcctccaacacccagagtcgccggactttcatcaagtcagtaccgccatttctgcgcacccatggctttgatgggctggaccttgcctggctctaccctggacggagagacaaacagcattttaccaccctaatcaaggaaatgaaggccgaatttataaaggaagcccagccagggaaaaagcagctcctgctcagcgcagcactgtctgcggggaaggtcaccattgacagcagctatgacattgccaagatatcccaacacctggatttcattagcatcatgacctacgattttcatggagcctggcgtgggaccacaggccatcacagtcccctgttccgaggtcaggaggatgcaagtcctgacagattcagcaacactgactatgctgtggggtacatgttgaggctgggggctcctgccagtaagctggtgatgggcatccccaccttcgggaggagcttcactctggcttcttctgagactggtgttggagccccaatctcaggaccgggaattccaggccggttcaccaaggaggcagggacccttgcctactatgagatctgtgacttcctccgcggagccacagtccatagaatcctcggccagcaggtcccctatgccaccaagggcaaccagtgggtaggatacgacgaccaggaaagcgtcaaaagcaaggtgcagtacctgaaggacaggcagctggcgggcgccatggtatgggccctggacctggatgacttccagggctccttctgcggccaggatctgcgcttccctctcaccaatgccatcaaggatgcactcgctgcaacgtagccctctgttctgcacacagcacgggggccaaggatgccccgtccccctctggctccagctggccgggagcctgatcacctgccctgctgagtcccaggctgagcctcagtctccctcccttggggcctatgcagaggtccacaacacacagatttgagctcagccctggtgggcagagaggtagggatggggctgtggggatagtgaggcatcgcaatgtaagactcgggattagtacacacttgttgattaatggaaatgtttacagatccccaagcctggcaagggaatttcttcaactccctgccccccagccctccttatcaaaggacaccattttggcaagctctatcaccaaggagccaaacatcctacaagacacagtgaccatactaattataccccctgcaaagcccagcttgaaaccttcacttaggaacgtaatcgtgtcccctatcctacttccccttcctaattccacagctgctcaataaagtacaagagcttaaaaaaaaaaaaaaaaaaaaaaaaa

SEQ ID NO: 240 - DNA, 1763 bp, Homo sapiens
accaggagccgtgggcaagggaagaggccacaccctgccctgctctgctgcagccagaatgggtgtgaaggcgtctcaaacaggctttgtggtcctggtgctgctccagtgctgctctgcatacaaactggtctgctactacaccagctggtcccagtaccgggaaggcgatgggagctgcttcccagatgcccttgaccgcttcctctgtacccacatcatctacagctttgccaatataagcaacgatcacatcgacacctgggagtggaatgatgtgacgctctacggcatgctcaacacactcaagaacaggaaccccaacctgaagactctcttgtctgtcggaggatggaactttgggtctcaaagattttccaagatagcctccaacacccagagtcgccggactttcatcaagtcagtaccgccatttctgcgcacccatggctttgatgggctggaccttgcctggctctaccctggacggggagacaaacagcattttaccaccctaatcaaggaaatgaaggccgaatttataaaggaagcccagccagggaaaaagcagctcctgctcagcgcagcactgtctgcggggaaggtcaccattgacagcagctatgacattgccaagatatcccaacacctggatttcattagcatcatgacctacgattttcatggagcctggcgtgggaccacaggccatcacagtcccctgttccgaggtcaggaggatgcaagtcctgacagattcagcaacactgactatgctgtggggtacatgttgaggctgggggctcctgccagtaagctggtgatgggcatccccaccttcgggaggagcttcactctggcttcttctgagactggtgttggagccccaatctcaggaccgggaattccaggccggttcaccaaggaggcagggacccttgcctactatgagatctgtgacttcctccgcggagccacagtccatagaatcctcggccagcaggtcccctatgccaccaagggcaaccagtgggtaggatacgacgaccaggaaagcgtcaaaagcaaggtgcagtacctgaaggacaggcagctggcgggcgccatggtatgggccctggacctggatgacttccagggctccttctgcggccaggatctgcgcttccctctcaccaatgccatcaaggatgcactcgctgcaacgtagccctctgttctgcacacagcacgggggccaaggatgccccgtccccctctggctccagctggccgggagcctgatcacctgccctgctgagtcccaggctgagcctcagtctccctcccttggggcctatgcagaggtccacaacacacagatttgagctcagccctggtgggcagagaggtagggatggggctgtggggatagtgaggcatcgcaatgtaagactcgggattagtacacacttgttgattaatggaaatgtttacagatccccaagcctggcaagggaatttcttcaactccctgccccccagccctccttatcaaaggacaccattttggcaagctctatcaccaaggagccaaacatcctacaagacacagtgaccatactaattataccccctgcaaagcccagcttgaaaccttcacttaggaacgtaatcgtgtcccctatcctacttccccttcctaattccacagctgctcaataaagtacaagagcttaaaaaaaaaaaaaaaaaaaaaaaaaaaaaaaaaaaaaaaaaaaaaa

SEQ ID NO: 241 - DNA, 1776 bp, Homo sapiens
gtagctggcaccaggagccgtgggcaagggaagaggccacaccctgccctgctctgctgcagccagaatgggtgtgaaggcgtctcaaacaggctttgtggtcctggtgctgctccagtgctgctctgcatacaaactggtctgctactacaccagctggtcccagtaccgggaaggcgatgggagctgcttcccagatgcccttgaccgcttcctctgtacccacatcatctacagctttgccaatataagcaacgatcacatcgacacctgggagtggaatgatgtgacgctctacggcatgctcaacacactcaagaacaggaaccccaacctgaagactctcttgtctgtcggaggatggaactttgggtctcaaagattttccaagatagcctccaacacccagagtcgccggactttcatcaagtcagtaccgccatttctgcgcacccatggctttgatgggctggaccttgcctggctctaccctggacggggagacaaacagcattttaccaccctaatcaaggaaatgaaggccgaatttataaaggaagcccagccagggaaaaagcagctcctgctcagcgcagcactgtctgcggggaaggtcaccattgacagcagctatgacattgccaagatatcccaacacctggatttcattagcatcatgacctacgattttcatggagcctggcgtgggaccacaggccatcacagtcccctgttccgaggtcaggaggatgcaagtcctgacagattcagcaacactgactatgctgtggggtacatgttgaggctgggggctcctgccagtaagctggtgatgggcatccccaccttcgggaggagcttcactctggcttcttctgagactggtgttggagccccaatctcaggaccgggaattccaggccggttcaccaaggaggcagggacccttgcctactatgagatctgtgacttcctccgcggagccacagtccatagaatcctcggccagcaggtcccctatgccaccaagggcaaccagtgggtaggatacgacgaccaggaaagcgtcaaaagcaaggtgcagtacctgaaggacaggcagctggcgggcgccatggtatgggccctggacctggatgacttccagggctccttctgcggccaggatctgcgcttccctctcaccaatgccatcaaggatgcactcgctgcaacgtagccctctgttctgcacacagcacgggggccaaggatgccccgtccccctctggctccagctggccgggagcctgatcacctgccctgctgagtcccaggctgagcctcagtctccctcccttggggcctatgcagaggtccacaacacacagatttgagctcagccctggtgggcagagaggtagggatggggctgtggggatagtgaggcatcgcaatgtaagactcgggattagtacacacttgttgattaatggaaatgtttacagatccccaagcctggcaagggaatttcttcaactccctgccccccagccctccttatcaaaggacaccattttggcaagctctatcaccaaggagccaaacatcctacaagacacagtgaccatactaattataccccctgcaaagcccagcttgaaaccttcacttaggaacgtaatcgtgtcccctatcctacttccccttcctaattccacagctgctcaataaagtacaagagcttaaaaaaaaaaaaaaaaaaaaaaaaaaaaaaaaaaaaaaaaaaaaaaaaaa

SEQ ID NO: 242 - DNA, 1041 bp, Homo sapiens
tgacatgcctgatcctctcttttctgcagttcaagggaaagacgagatcttgcacaaggcactctgcttctgcccttggctggggaagggtggcatggagcctctccggctgctcatcttactctttgtcacagagctgtccggagcccacaacaccacagtgttccagggcgtggcgggccagtccctgcaggtgtcttgcccctatgactccatgaagcactgggggaggcgcaaggcctggtgccgccagctgggagagaagggcccatgccagcgtgtggtcagcacgcacaacttgtggctgctgtccttcctgaggaggtggaatgggagcacagccatcacagacgataccctgggtggcactctcaccattacgctgcggaatctacaaccccatgatgcgggtctctaccagtgccagagcctccatggcagtgaggctgacaccctcaggaaggtcctggtggaggtgctggcagaccccctggatcaccgggatgctggagatctctggttccccggggagtctgagagcttcgaggatgcccatgtggagcacagcatctccaggagcctcttggaaggagaaatccccttcccacccacttccatccttctcctcctggcctgcatctttctcatcaagattctagcagccagcgccctctgggctgcagcctggcatggacagaagccagggacacatccacccagtgaactggactgtggccatgacccagggtatcagctccaaactctgccagggctgagagacacgtgaaggaagatgatgggaggaaaagcccaggagaagtcccaccagggaccagcccagcctgcatacttgccacttggccaccaggactccttgttctgctctggcaagagactactctgcctgaacactgcttctcctggaccctggaagcagggactggttgagggagtggggaggtggtaagaacacctgacaacttctgaatattggacattttaaacacttacaaataaatccaagactgtcatatttaaaaa

SEQ ID NO: 243 - DNA, 1041 bp, Homo sapiens; identical to SEQ ID NO: 242

SEQ ID NO: 244 - DNA, 867 bp, Homo sapiens
gggcagcgcctgacatgcctgatcctctcttttctgcagttcaagggaaagacgagatcttgcacaaggcactctgcttctgcccttggctggggaagggtggcatggagcctctccggctgctcatcttactctttgtcacagagctgtccggagcccacaacaccacagtgttccagggcgtggcgggccagtccctgcaggtgtcttgcccctatgactccatgaagcactgggggaggcgcaaggcctggtgccgccagctgggagagaagggcccatgccagcgtgtggtcagcacgcacaacttgtggctgctgtccttcctgaggaggtggaatgggagcacagccatcacagacgataccctgggtggcactctcaccattacgctgcggaatctacaaccccatgatgcgggtctctaccagtgccagagcctccatggcagtgaggctgacaccctcaggaaggtcctggtggaggtgctggcagaccccctggatcaccgggatgctggagatctctggttccccggggagtctgagagcttcgaggatgcccatgtggagcacagcatctccagggctgagagacacgtgaaggaagatgatgggaggaaaagcccaggagaagtcccaccagggaccagcccagcctgcatacttgccacttggccaccaggactccttgttctgctctggcaagagactactctgcctgaacactgcttctcctggaccctggaagcagggactggttgagggagtggggaggtggtaagaacacctgacaacttctgaatattggacattttaaacacttacaaataaatccaagactgtcatatttagctggaaaaaaaaa

SEQ ID NO: 245 - DNA, 1098 bp, Homo sapiens
ccttggctggggaagggtggcatggagcctctccggctgctcatcttactctttgtcacagagctgtccggagcccacaacaccacagtgttccagggcgtggcgggccagtccctgcaggtgtcttgcccctatgactccatgaagcactgggggaggcgcaaggcctggtgccgccagctgggagagaagggcccatgccagcgtgtggtcagcacgcacaacttgtggctgctgtccttcctgaggaggtggaatgggagcacagccatcacagacgataccctgggtggcactctcaccattacgctgcggaatctacaaccccatgatgcgggtctctaccagtgccagagcctccatggcagtgaggctgacaccctcaggaaggtcctggtggaggtgctggcagaccccctggatcaccgggatgctggagatctctggttccccggggagtctgagagcttcgaggatgcccatgtggagcacagcatctccaggccatctcaaggctcccatctgccttcttgtctctccaaggagcctcttggaaggagaaatccccttcccacccacttccatccttctcctcctggcctgcatctttctcatcaagattctagcagccagcgccctctgggctgcagcctggcatggacagaagccagggacacatccacccagtgaactggactgtggccatgacccagggtatcagctccaaactctgccagggctgagagacacgtgaaggaagatgatgggaggaaaagcccaggagaagtcccaccagggaccagcccagcctgcatacttgccacttggccaccaggactccttgttctgctctggcaagagactactctgcctgaacactgcttctcctggaccctggaagcagggactggttgagggagtggggaggtggtaagaacacctgacaacttctgaatattggacattttaaacacttacaaataaatccaagactgtcatatttagctggataaaaaaaaaaaaaaaaaaaaaaaaaaaaaaaaaaaaaaaaaaaaaaaaaaaaaaaaaaaaaaaaaaaaaaaaaaaaaaaaaaaaaaa

SEQ ID NO: 246 - DNA, 981 bp, Homo sapiens
gcccttggctggggaagggtggcatggagcctctccggctgctcatcttactctttgtcacagagtctgtccggagcccacaacaccacagtgttccagggcgtggcgggccagtccctgcaggtgtcttgcccctatgactccatgaagcactgggggaggcgcaaggcctggtgccgccagctgggagagaagggcccatgccagcgtgtggtcagcacgcacaacttgtggctgctgtccttcctgaggaggtggaatgggagcacagccatcacagacgataccctgggtggcactctcaccattacgctgcggaatctacaaccccatgatgcgggtctctaccagtgccagagcctccatggcagtgaggctgacaccctcaggaaggtcctggtggaggtgctggcagaccccctggatcaccgggatgctggagatctctggttccccggggagtctgagagcttcgaggatgcccatgtggagcacagcatctccaggagcctcttggaaggagaaatccccttcccacccacttccatccttctcctcctggcctgcatctttctcatcaagattctagcagccagcgccctctgggctgcagcctggcatggacagaagccagggacacatccacccagtgaactggactgtggccatgacccagggtatcagctccaaactctgccagggctgagagacacgtgaaggaagatgatgggaggaaaagcccaggagaagtcccaccagggaccagcccagcctgcatacttgccacttggccaccaggactccttgttctgctctggcaagagactactctgcctgaacactgcttctcctggaccctggaagcagggactggttgagggagtggggaggtggtaagaacacctgacaacttctgaatattggacattttaaacacttacaaataaatccaagactgtcatatttaaaaaaaaaaaaaaa

SEQ ID NO: 247 - DNA, 2751 bp, Homo sapiens
ggcacgaggccggatccaccgtgcctctgcggcctgcgtgcccggagtccccgcctgtgtcgtctctgtcgccgtccccgtctcctgccaggcgcggagccctgcgagccgcgggtgggccccaggcgcgcagacatgggctgctccgccaaagcgcgctgggctgccggggcgctgggcgtcgcggggctactgtgcgctgtgctgggcgctgtcatgatcgtgatggtgccgtcgctcatcaagcagcaggtccttaagaacgtgcgcatcgaccccagtagcctgtccttcaacatgtggaaggagatccctatccccttctatctctccgtctacttctttgacgtcatgaaccccagcgagatcctgaagggcgagaagccgcaggtgcgggagcgcgggccctacgtgtacagggagttcaggcacaaaagcaacatcaccttcaacaacaacgacaccgtgtccttcctcgagtaccgcaccttccagttccagccctccaagtcccacggctcggagagcgactacatcgtcatgcccaacatcctggtcttgggtgcggcggtgatgatggagaataagcccatgaccctgaagctcatcatgaccttggcattcaccaccctcggcgaacgtgccttcatgaaccgcactgtgggtgagatcatgtggggctacaaggacccccttgtgaatctcatcaacaagtactttccaggcatgttccccttcaaggacaagttcggattatttgctgagctcaacaactccgactctgggctcttcacggtgttcacgggggtccagaacatcagcaggatccacctcgtggacaagtggaacgggctgagcaaggttgacttctggcattccgatcagtgcaacatgatcaatggaacttctgggcaaatgtggccgcccttcatgactcctgagtcctcgctggagttctacagcccggaggcctgccgatccatgaagctaatgtacaaggagtcaggggtgtttgaaggcatccccacctatcgcttcgtggctcccaaaaccctgtttgccaacgggtccatctacccacccaacgaaggcttctgcccgtgcctggagtctggaattcagaacgtcagcacctgcaggttcagtgcccccttgtttctctcccatcctcacttcctcaacgccgacccggttctggcagaagcggtgactggcctgcaccctaaccaggaggcacactccttgttcctggacatccacccggtcacgggaatccccatgaactgctctgtgaaactgcagctgagcctctacatgaaatctgtcgcaggcattggacaaactgggaagattgagcctgtggtcctgccgctgctctggtttgcagagagcggggccatggagggggagactcttcacacattctacactcagctggtgttgatgcccaaggtgatgcactatgcccagtacgtcctcctggcgctgggctgcgtcctgctgctggtccctgtcatctgccaaatccggagccaagtaggtgctggccagagggcagcccgggctgacagccattcgcttgcctgctgggggaaaggggcctcagatcggaccctctggccaaccgcagcctggagcccacctccagcagcagtcctgcgtctctgccggagtgggagcggtcactgctgggggctgcgcagcacgcttgcgtcttttgcatgccgcgttgccactactctgcctgttctggaaggcctgggaccctcccttggagggggcacagggtcctgaggacaccgtgagccagccaggcctggccgctgggcctgaccggccccccagcccctacaccccgcttctcccggactctcccagcggacagccccccagccccacagcctgagcctcccagctgccatgtgcctgttgcacacctgcacacacgccctggcacacatacacacatgcgtgcaggcttgtgcagacactcagggatggagctgctgctgaagggacttgtagggagaggctcgtcaacaagcactgttctggaaccttctctccacgtggcccacaggcctgaccacaggggctgtgggtcctgcgtccccttcctcgggtgagcctggcctgtcccgttcagccgttgggcccaggcttcctcccctccaaggtgaaacactgcagtcccggtgtggtggctccccatgcaggacgggccaggctgggagtgccgccttcctgtgccaaattcagtggggactcagtgcccaggccctggccacgagctttggccttggtctacctgccaggccaggcaaagcgcctttacacaggcctcggaaaacaatggagtgagcacaagatgccctgtgcagctgcccgagggtctccgcccaccccggccggactttgatccccccgaagtcttcacaggcactgcatcgggttgtctggcgcccttttcctccagcctaaactgacatcatcctatggactgagccggccactctctggccgaagtggccgcaggctgtgcccccgagctgcccccaccccctcacagggtccctcagattataggtgcccaggctgaggtgaagaggcctgggggccctgccttccgggcgctcctggaccctggggcaaacctgtgacccttttctactggaatagaaatgagttttatcatctttgaaaaataattcactcttgaagtaataaacgtttaaaaaaaaaaaaaaaaaa

SEQ ID NO: 248 - DNA, 2751 bp, Homo sapiens; identical to SEQ ID NO: 247

SEQ ID NO: 249 - DNA, 2566 bp, Homo sapiens
cgtcgccgtccccgtctcctgccaggcgcggagccctgcgagccgcgggtgggccccaggcgcgcagacatgggctgctccgccaaagcgcgctgggctgccggggcgctgggcgtcgcggggctactgtgcgctgtgctgggcgctgtcatgatcgtgatggtgccgtcgctcatcaagcagcaggtccttaagaacgtgcgcatcgaccccagtagcctgtccttcaacatgtggaaggagatccctatccccttctatctctccgtctacttctttgacgtcatgaaccccagcgagatcctgaagggcgagaagccgcaggtgcgggagcgcgggccctacgtgtacagggagtccaggcacaaaagcaacatcaccttcaacaacaacgacaccgtgtccttcctcgagtaccgcaccttccagttccagccctccaagtcccacggctcggagagcgactacatcgtcatgcccaacatcctggtcttgggtgcggcggtgatgatggagaataagcccatgaccctgaagctcatcatgaccttggcattcaccaccctcggcgaacgtgccttcatgaaccgcactgtgggtgagatcatgtggggctacaaggacccccttgtgaatctcatcaacaagtactttccaggcatgttccccttcaaggacaagttcggattatttgctgagctcaacaactccgactctgggctcttcacggtgttcacgggggtccagaacatcagcaggatccacctcgtggacaagtggaacgggctgagcaaggttgacttctggcattccgatcagtgcaacatgatcaatggaacttctgggcaaatgtggccgcccttcatgactcctgagtcctcgctggagttctacagcccggaggcctgccgatccatgaagctaatgtacaaggagtcaggggtgtttgaaggcatccccacctatcgcttcgtggctcccaaaaccctgtttgccaacgggtccatctacccacccaacgaaggcttctgcccgtgcctggagtctggaattcagaacgtcagcacctgcaggttcagtgcccccttgtttctctcccatcctcacttcctcaacgccgacccggttctggcagaagcggtgactggcctgcaccctaaccaggaggcacactccttgttcctggacatccacccggtcacgggaatccccatgaactgctctgtgaaactgcagctgagcctctacatgaaatctgtcgcaggcattggacaaactgggaagattgagcctgtggtcctgccgctgctctggtttgcagagagcggggccatggagggggagactcttcacacattctacactcagctggtgttgatgcccaaggtgatgcactatgcccagtacgtcctcctggcgctgggctgcgtcctgctgctggtccctgtcatctgccaaatccggagccaagagaaatgctatttattttggagtagtagtaaaaagggctcaaaggataaggaggccattcaggcctattctgaatccctgatgacatcagctcccaagggctctgtgctgcaggaagcaaaactgtagggtcctgaggacaccgtgagccagccaggcctggccgctgggcctgaccggccccccagcccctacaccccgcttctcccggactctcccagcagacagccccccagccccacagcctgagcctcccagctgccatgtgcctgttgcacacctgcacacacgccctggcacacatacacacatgcgtgcaggcttgtgcagacactcagggatggagctgctgctgaagggacttgtagggagaggctcgtcaacaagcactgttctggaaccttctctccacgtggcccacaggctgaccacaggggctgtgggtcctgcgtccccttcctcgggtgagcctggcctgtcccgttcagccgttgggccaggcttcctcccctccaaggtgaaacactgcagtcccggtgtggtggctccccatgcaggacgggccaggctgggagtgccgccttcctgtgccaaattcagtggggactcagtgcccaggccctggcacgagctttggccttggtctacctgccaggccaggcaaagcgcctttacacaggcctcggaaaacaatggagtgagcacaagatgccctgtgcagctgcccgagggtctccgcccaccccggccggactttgatccccccgaagtcttcacaggcactgcatcgggttgtctggcgcccttttcctccagcctaaactgacatcatcctatggactgagccggccactctctggccgaagtggcgcaggctgtgcccccgagctgcccccaccccctcacagggtccctcagattataggtgcccaggctgaggtgaagaggcctgggggccctgccttccgggcgctcctggaccctggggcaaacctgtgacccttttctactggaatagaaatgagttttatcatctttgaaaaataattcactcttgaagtaataaacgtttaaaaaaatggaaaaaaaaaaaaaa

SEQ ID NO: 250 - DNA, 1739 bp, Homo sapiens
cgtcctacagcattctggaaacttgaggatgtgcggtgcataaaggggctggaagtgacccacctgtgatgagccctttctaaggagaagggtttccaagagatcaccccaccagaaaagggtaggaatgagcaagttgggaattttagactgtcactgcacatggacctctgggaagacgtctggcgagagctaggcccactggccctacagacggatcttgctggctcacctgtccctgtggaggttcccctgggaaggcaagatgcccaacaacagcactgctctgtcattggccaatgttacctacatcaccatggaaattttcattggactctgcgccatagtgggcaacgtgctggtcatctgcgtggtcaagctgaaccccagcctgcagaccaccaccttctatttcattgtctctctagccctggctgacattgctgttggggtgctggtcatgcctttggccattgttgtcagcctgggcatcacaatccacttctacagctgcctttttatgacttgcctactgcttatctttacccacgcctccatcatgtccttgctggccatcgctgtggaccgatacttgcgggtcaagcttaccgtcagatacaagagggtcaccactcacagaagaatatggctggccctgggcctttgctggctggtgtcattcctggtgggattgacccccatgtttggctggaacatgaaactgacctcagagtaccacagaaatgtcaccttcctttcatgccaatttgtttccgtcatgagaatggactacatggtatacttcagcttcctcacctggattttcatccccctggttgtcatgtgcgccatctatcttgacatcttttacatcattcggaacaaactcagtctgaacttatctaactccaaagagacaggtgcattttatggacgggagttcaagacggctaagtccttgtttctggttcttttcttgtttgctctgtcatggctgcctttatctatcatcaactgcatcatctactttaatggtgaggtaccacagcttgtgctgtacatgggcatcctgctgtcccatgccaactccatgatgaaccctatcgtctatgcctataaaataaagaagttcaaggaaacctaccttttgatcctcaaagcctgtgtggtctgccatccctctgattctttggacacaagcattgagaagaattctgagtagttatccatcagagatgactctgtctcattgaccttcagattccccatcaacaaacacttgagggcctgtatgcctgggccaagggatttttacatccttgattacttccactgaggtgggagcatctccagtgctccccaattatatctcccccactccactactctcttcctccacttcatttttcctttgtcctttctctctaattcagtgttttggaggcctgacttggggacaacgtattattgatattattgtctgttttccttcttcccaatagaagaataagtcatggagcctgaagggtgcctagttgacttactgacaaaaggctctagttgggctgaacatgtgtgtggtggtgactcatttccatgccattgtggaattgagcagagaacctgctctcggaggatgcctagaagatgttgggaacagaagaaataaactgagtttaagggggacttaaactgctgaattcacctgtggatgtttttgagtaaataaaagctaatag

SEQ ID NO: 251 - DNA, 2241 bp, Homo sapiens
atctttgctgcaaaggctgggtatcggctgtgctcagcaaagcgtcaactcgtgcaagaacttagcaggaatagttctggctaaggttaggaggctgccaccaaagtctcttttttgttcctctgcttctcccgtttgcctccttatcatgagatctttttgctaagctggcagaaagattgcatagtcagtgcttccagctctgctcccacctgatcctgcactgtcctctggtccctgaatgaatgaactctgatacccaatcttgtctcgagccttctctatgccactcatggctcctcttctgctctttccatctttttgctgagagttctgagctctgtacttcctcttggcccatctcacttcctgaaacacccctgaagagggttgcttatcttgatggaactcaaaaagccaaaaagctgcaggcagaggcgttgaggacatctgtttggggaactaagagcagcagcactttcagattcagtccatatagagctgtcctacagcattctggaaacttgaggatgtgcggtgcataaaggggctggaagtgacccacctgtgatgagccctttctaaggagaagggtttccaagagatcaccccaccagaaaagggtaggaatgagcaagttgggaattttagactgtcactgcacatggacctctgggaagacgtctggcgagagctaggcccactggccctacagacggatcttgctggctcacctgtccctgtggaggttcccctgggaaggcaagatgcccaacaacagcactgctctgtcattggccaatgttacctacatcaccatggaaattttcattggactctgcgccatagtgggcaacgtgctggtcatctgcgtggtcaagctgaaccccagcctgcagaccaccaccttctatttcattgtctctctagccctggctgacattgctgttggggtgctggtcatgcctttggccattgttgtcagcctgggcatcacaatccacttctacagctgcctttttatgacttgcctactgcttatctttacccacgcctccatcatgtccttgctggccatcgctgtggaccgatacttgcgggtcaagcttaccgtcagatacaagagggtcaccactcacagaagaatatggctggccctgggcctttgctggctggtgtcattcctggtgggattgacccccatgtttggctggaacatgaaactgacctcagagtaccacagaaatgtcaccttcctttcatgccaatttgtttccgtcatgagaatggactacatggtatacttcagcttcctcacctggattttcatccccctggttgtcatgtgcgccatctatcttgacatcttttacatcattcggaacaaactcagtctgaacttatctaactccaaagagacaggtgcattttatggacgggagttcaagacggctaagtccttgtttctggttcttttcttgtttgctctgtcatggctgcctttatctatcatcaactgcatcatctactttaatggtgaggtaccacagcttgtgctgtacatgggcatcctgctgtcccatgccaactccatgatgaaccctatcgtctatgcctataaaataaagaagttcaaggaaacctaccttttgatcctcaaagcctgtgtggtctgccatccctctgattctttggacacaagcattgagaagaattctgagtagttatccatcagagatgactctgtctcattgaccttcagattccccatcaacaaacacttgagggcctgtatgcctgggccaagggatttttacatccttgattacttccactgaggtgggagcatctccagtgctccccaattatatctcccccactccactactctcttcctccacttcatttttcctttgtcctttctctctaattcagtgttttggaggcctgacttggggacaacgtattattgatattattgtctgttttccttcttcccaatagaagaataagtcatggagcctgaagggtgcctagttgacttactgacaaaaggctctagttgggctgaacatgtgtgtggtggtgactcatttccatgccattgtggaattgagcagagaacctgctctcggaggatgcctagaagatgttgggaacagaagaaataaactgagtttaagggggacttaaactgctgaattcacctgtggatgtttttgagtaaataaaagctaatag

SEQ ID NO: 252 - DNA, 1767 bp, Homo sapiens
tccttctgattcagtccatatagagctgtcctacagcattctggaaacttgaggatgtgcggtgcataaaggggctggaagtgacccacctgtgatgagccctttctaaggagaagggtttccaagagatcaccccaccagaaaagggtaggaatgagcaagttgggaattttagactgtcactgcacatggacctctgggaagacgtctggcgagagctaggcccactggccctacagacggatcttgctggctcacctgtccctgtggaggttcccctgggaaggcaagatgcccaacaacagcactactctgtcattggccaatgttacctacatcaccatggaaattttcattggactctgcgccatagtgggcaacgtgctggtcatctgcgtggtcaagctgaaccccagcctgcagaccaccaccttctatttcattgtctctctagccctggctgacattgctgttggggtgctggtcatgcctttggccattgttgtcagcctgggcatcacaatccacttctacagctgcctttttatgacttgcctactgcttatctttacccacgcctccatcatgtccttgctggccatcgctgtggaccgatacttgcgggtcaagcttaccgtcagatacaagagggtcaccactcacagaagaatatggctggccctgggcctttgctggctggtgtcattcctggtgggattgacccccatgtttggctggaacatgaaactgacctcagagtaccacagaaatgtcaccttcctttcatgccaatttgtttccgtcatgagaatggactacatggtatacttcagcttcctcacctggattttcatccccctggttgtcatgtgcgccatctatcttgacatcttttacatcattcggaacaaactcagtctgaacttatctaactccaaagagacaggtgcattttatggacgggagttcaagacggctaagtccttgtttctggttcttttcttgtttgctctgtcatggctgcctttatctatcatcaactgcatcatctactttaatggtgaggtaccacagcttgtgctgtacatgggcatcctgctgtcccatgccaactccatgatgaaccctatcgtctatgcctataaaataaagaagttcaaggaaacctaccttttgatcctcaaagcctgtgtggtctgccatccctctgattctttggacacaagcattgagaagaattctgagtagttatccatcagagatgactctgtctcattgaccttcagattccccatcaacaaacacttgagggcctgtatgcctgggccaagggatttttacatccttgattacttccactgaggtgggagcatctccagtgctccccaattatatctcccccactccactactctcttcctccacttcatttttcctttgtcctttctctctaattcagtgttttggaggcctgacttggggacaacgtattattgatattattgtctgttttccttcttcccaatagaagaataagtcatggagcctgaagggtgcctagttgacttactgacaaaaggctctagttgggctgaacatgtgtgtggtggtgactcatttccatgccattgtggaattgagcagagaacctgctctcggaggatgcctagaagatgttgggaacagaagaaataaactgagtttaagggggacttaaactgctgaattcacctgtggatgtttttgagtaaataaaagctaatagcg

SEQ ID NO: 253 - DNA, 1812 bp, Homo sapiens
ggaactaagagcagcagcactttcagattcagtccatatagagctgtcctacagcattctggaaacttgaggatgtgcggtgcataaaggggctggaagtgacccacctgtgatgagccctttctaaggagaagggtttccaagagatcaccccaccagaaaagggtaggaatgagcaagttgggaattttagactgtcactgcacatggacctctgggaagacgtctggcgagagctaggcccactggccctacagacggatcttgctggctcacctgtccctgtggaggttcccctgggaaggcaagatgcccaacaacagcactgctctgtcattggccaatgttacctacatcaccatggaaattttcattggactctgcgccatagtgggcaacgtgctggtcatctgcgtggtcaagctgaaccccagcctgcagaccaccaccttctatttcattgtctctctagccctggctgacattgctgttggggtgctggtcatgcctttggccattgttgtcagcctgggcatcacaatccacttctacagctgcctttttatgacttgcctactgcttatctttacccacgcctccatcatgtccttgctggccatcgctgtggaccgatacttgcgggtcaagcttaccgtcagatacaagagggtcaccactcacagaagaatatggctggccctgggcctttgctggctggtgtcattcctggtgggattgacccccatgtttggctggaacatgaaactgacctcagagtaccacagaaatgtcaccttcctttcatgccaatttgtttccgtcatgagaatggactacatggtatacttcagcttcctcacctggattttcatccccctggttgtcatgtgcgccatctatcttgacatcttttacatcattcggaacaaactcagtctgaacttatctaactccaaagagacaggtgcattttatggacgggagttcaagacggctaagtccttgtttctggttcttttcttgtttgctctgtcatggctgcctttatctatcatcaactgcatcatctactttaatggtgaggtaccacagcttgtgctgtacatgggcatcctgctgtcccatgccaactccatgatgaaccctatcgtctatgcctataaaataaagaagttcaaggaaacctacctcttgatcctcaaagcctgtgtggtctgccatccctctgattctttggacacaagcattgagaagaattctgagtagttatccatcagagatgactctgtctcattgaccttcagattccccatcaacaaacacttgagggcctgtatgcctgggccaagggatttttacatccttgattacttccactgaggtgggagcatctccagtgctccccaattatatctcccccactccactactctcttcctccacttcatttttcctttgtcctttctctctaattcagtgttttggaggcctgacttggggacaacgtattattgatattattgtctgttttccttcttcccaatagaagaataagtcatggagcctgaagggtgcctagttgacttactgacaaaaggctctagttgggctgaacatgtgtgtggtggtgactcatttccatgccattgtggaattgagcagagaacctgctctcggaggatgcctagaagatgttgggaacagaagaaataaactgagtttaagggggacttaaactgctgaattcacctgtggatgtttttgagtaaataaaagctaatagctaaaaaaaaaaaaaaaaaaaaaaaaaaa

SEQ ID NO: 254 - DNA, 957 bp, Homo sapiens
atgcccaacaacagcactgctctgtcattggccaatgttacctacatcaccatggaaattttcattggactctgcgccatagtgggcaacgtgctggtcatctgcgtggtcaagctgaaccccagcctgcagaccaccaccttctatttcattgtctctctagccctggctgacattgctgttggggtgctggtcatgcctttggccattgttgtcagcctgggcatcacaatccacttctacagctgcctttttatgacttgcctactgcttatctttacccacgcctccatcatgtccttgctggccatcgctgtggaccgatacttgcgggtcaagcttaccgtcagatacaagagggtcaccactcacagaagaatatggctggccctgggcctttgctggctggtgtcattcctggtgggattgacccccatgtttggctggaacatgaaactgacctcagagtaccacagaaatgtcaccttcctttcatgccaatttgtttccgtcatgagaatggactacatggtatacttcagcttcctcacctggattttcatccccctggttgtcatgtgcgccatctatcttgacatcttttacatcattcggaacaaactcagtctgaacttatctaactccaaagagacaggtgcattttatggacgggagttcaagacggctaagtccttgtttctggttcttttcttgtttgctctgtcatggctgcctttatctatcatcaactgcatcatctactttaatggtgaggtaccacagcttgtgctgtacatgggcatcctgctgtcccatgccaactccatgatgaaccctatcgtctatgcctataaaataaagaagttcaaggaaacctaccttttgatcctcaaagcctgtgtggtctgccatccctctgattctttggacacaagcattgagaagaattctgagtag

SEQ ID NO: 255 - DNA, 1771 bp, Homo sapiens
cgaattcgggggacatctgtttggggaactaagagcagcagcactttcagattcagtccatatagagctgtcctacagcattctggaaacttgaggatgtgcggtgcataaacgggctggaagtgacccacctgtgatgagccctttctaaggagaagggtttccaagagatcaccccaccagaaaagggtaggaatgagcaagttgggaattttagactgtcactgcacatggacctctgggaagacgtctggcgagagctaggcccactggccctacagacggatcttgctggctcacctgtccctgtggaggttcccctgggaaggcaagatgcccaacaacagcactgctctgtcattggccaatgttacctacatcaccatggaaattttcattggactctgcgccatagtgggcaacgtgctggtcatctgcgtggtcaagctgaaccccagcctgcagaccaccaccttctatttcattgtctctctagccctggctgacattgctgttggggtgctggtcatgcctttggccattgttgtcagcctgggcatcacaatccacttctacagctgcctttttatgacttgcctactgcttatctttacccacgcctccatcatgtccttgctggccatcgctgtggaccgatacttgcgggtcaagcttaccgtcagatacaagagggtcaccactcacagaagaatatggctggccctgggcctttgctggctggtgtcattcctggtgggattgacccccatgtttggctggaacatgaaactgacctcagagtaccacagaaatgtcaccttcctttcatgccaatttgtttccgtcatgaggatggactacatggtatacttcagcttcctcacctggattttcatccccctggttgtcatgtgcgccatctatcttgacatcttttacatcattcggaacaaactcagtctgaacttatctaactccaaagagacaggtgcattttatggacgggagttcaagacggctaagtccttgtttctggttcttttcttgtttgctctgtcatggctgcctttatctctcatcaactgcatcatctactttaatggtgaggtaccacagcttgtgctgtacatgggcatcctgctgtcccatgccaactccatgatgaaccctatcgtctatgcctataaaataaagaagttcaaggaaacctaccttttgatcctcaaagcctgtgtggtctgccatccctctgattctttggacacaagcattgagaagaattctgagtagttatccatcagagatgactctgtctcattgaccttcagattccccatcaacaaacacttgagggcctgtatgcctgggccaagggatttttacatccttgattacttccactgaggtgggagcatctccagtgctccccaattatatctcccccactccactactctcttcctccacttcatttttcctttgtcctttctctctaattcagtgttttggaggcctgacttggggacaacgtattattgatattattgtctgttttccttcttcccaatagaagaataagtcatggagcctgaagggtgcctagttgacttactgacaaaaggctctagttgggctgaacatgtgtgtggtggtgactcatttccatgccattgtggaattgagcagagaacctgctctcggaggatgcctaggagatgttgggaacagaagaaataaactgagtttaagggggacttaaactgctgaattc

SEQ ID NO: 256 - DNA, 2921 bp, Homo sapiens
agcctgtggagacgggacagccctgtcccactcactctttcccctgccgctcctgccggcagctccaaccatgggaggccgcgtctttctcgcattctgtgtctggctgactctgccgggagctgaaacccaggactccaggggctgtgcccggtggtgccctcagaactcctcgtgtgtcaatgccaccgcctgtcgctgcaatccagggttcagctctttttctgagatcatcaccaccccgacggagacttgtgacgacatcaacgagtgtgcaacaccgtcgaaagtgtcatgcggaaaattctcggactgctggaacacagaggggagctacgactgcgtgtgcagcccgggatatgagcctgtttctggggcaaaaacattcaagaatgagagcgagaacacctgtcaagatgtggacgagtgcagctccgggcagcatcagtgtgacagctccaccgtctgcttcaacaccgtgggttcatacagctgccgctgccgcccaggctggaagcccagacacggaatcccgaataaccaaaaggacactgtctgtgaagatatgactttctccacctggaccccgccccctggagtccacagccagacgctttcccgattcttcgacaaagtccaggacctgggcagagactccaagacaagctcagccgaggtcaccatccagaatgtcatcaaattggtggatgaactgatggaagctcctggagacgtagaggccctggcgccacctgtccggcacctcatagccacccagctgctctcaaaccttgaagatatcatgaggatcctggccaagagcctgcctaaaggccccttcacctacatttccccttcgaacacagagctgaccctgatgatccaggagcggggggacaagaacgtcactatgggtcagagcagcgcacgcatgaagctgaattgggctgtggcagctggagccgaggatccaggccccgccgtggcgggcatcctctccatccagaacatgacgacattgctggccaatgcctccttgaacctgcattccaagaagcaagccgaactggaggagatatatgaaagcagcatccgtggtgtccaactcagacgcctctctgccgtcaactccatctttctgagccacaacaacaccaaggaactcaactcccccatccttttcgccttctcccaccttgagtcctccgatggggaggcgggaagagaccctcctgccaaggacgtgatgcctgggccacggcaggagctgctctgtgccttctggaagagtgacagcgacaggggagggcactgggccaccgagggctgccaggtgctgggcagcaagaacggcagcaccacctgccaatgcagccacctgagcagctttgcgatccttatggctcattatgacgtggaggactggaagctgaccctgatcaccagggtgggactggcgctgtcactcttctgcctgctgctgtgcatcctcactttcctgctggtgcggcccatccagggctcgcgcaccaccatacacctgcacctctgcatctgcctcttcgtgggctccaccatcttcctggccggcatcgagaacgaaggcggccaggtggggctgcgctgccgcctggtggccgggctgctgcactactgtttcctggccgccttctgctggatgagcctcgaaggcctggagctctactttcttgtggtgcgcgtgttccaaggccagggcctgagtacgcgctggctctgcctgatcggctatggcgtgcccctgctcatcgtgggcgtctcggctgccatctacagcaagggctacggccgccccagatactgctggttggactttgagcagggcttcctctggagcttcttgggacctgtgaccttcatcattttgtgcaatgctgtcattttcgtgactaccgtctggaagctcactcagaagttttctgaaatcaatccagacatgaagaaattaaagaaggcgagggcgctgaccatcacggccatcgcgcagctcttcctgttgggctgcacctgggtctttggcctgttcatcttcgacgatcggagcttggtgctgacctatgtgtttaccatcctcaactgcctgcagggcgccttcctctacctgctgcactgcctgctcaacaagaaggttcgggaagaataccggaagtgggcctgcctagttgctggggggagcaagtactcagaattcacctccaccacgtctggcactggccacaatcagacccgggccctcagggcatcagagtccggcatatgaaggcgcatggttctggacggcccagcagctcctgtggccacagcagctttgtacacgaagaccatccatcctcccttcgtccaccactctactccctccaccctccctccctgatcccgtgtgccaccaggagggagtggcagctatagtctggcaccaaagtccaggacacccagtggggtggagtcggagccactggtcctgctgctggctgcctctctgctccaccttgtgacccagggtggggacaggggctggcccagggctgcaatgcagcatgttgccctggcacctgtggccagtactcgggacagactaagggcgcttgtcccatcctggacttttcctctcatgtctttgctgcagaactgaagagactaggcgctggggctcagcttccctcttaagctaagactgatgtcagaggccccatggcgaggccccttggggccactgcctgaggctcacggtacagaggcctgccctgcctggccgggcaggaggttctcactgttgtgaaggttgtagacgttgtgtaatgtgtttttatctgttaaaatttttcagtgttgacacttaaaattaaacacatgcatacagaaaaaaaaaaaaaaaaaaaaaa

SEQ ID NO: 257 - DNA, 3178 bp, Homo sapiens
agcctgtggagacgggacagccctgtcccactcactctttcccctgccgctcctgccggcagctccaaccatgggaggccgcgtctttctcgcattctgtgtctggctgactctgccgggagctgaaacccaggactccaggggctgtgcccggtggtgccctcagaactcctcgtgtgtcaatgccaccgcctgtcgctgcaatccagggttcagctctttttctgagatcatcaccaccccgacggagacttgtgacgacatcaacgagtgtgcaacaccgtcgaaagtgtcatgcggaaaattctcggactgctggaacacagaggggagctacgactgcgtgtgcagcccgggatatgagcctgtttctggggcaaaaacattcaagaatgagagcgagaacacctgtcaagatgtggacgaatgtcagcagaacccaaggctctgtaaaagctacggcacctgcgtcaacacccttggcagctatacctgccagtgcctgcctggcttcaagttcatacctgaggatccgaaggtctgcacagatgtgaatgaatgcacctccggacaaaacccgtgccacagctccacccactgcctcaacaacgtgggcagctatcagtgccgctgccgcccgggctggcaaccgattccggggtcccccaatggcccaaacaataccgtctgtgaagatgtggacgagtgcagctccgggcagcatcagtgtgacagctccaccgtctgcttcaacaccgtgggttcatacagctgccgctgccgcccaggctggaagcccagacacggaatcccgaataaccaaaaggacactgtctgtgaagatatgactttctccacctggaccccgccccctggagtccacagccagacgctttcccgattcttcgacaaagtccaggacctgggcagagactccaagacaagctcagccgaggtcaccatccagaatgtcatcaaattggtggatgaactgatggaagctcctggagacgtagaggccctggcgccacctgtccggcacctcatagccacccagctgctctcaaaccttgaagatatcatgaggatcctggccaagagcctgcctaaaggccccttcacctacatttccccttcgaacacagagctgaccctgatgatccaggagcggggggacaagaacgtcactatgggtcagagcagcgcacgcatgaagctgaattgggctgtggcagctggagccgaggatccaggccccgccgtggcgggcatcctctccatccagaacatgacgacattgctggccaatgcctccttgaacctgcattccaagaagcaagccgaactggaggagatatatgaaagcagcatccgtggtgtccaactcagacgcctctctgccgtcaactccatctttctgagccacaacaacaccaaggaactcaactcccccatccttttcgccttctcccaccttgagtcctccgatggggaggcgggaagagaccctcctgccaaggacgtgatgcctgggccacggcaggagctgctctgtgccttctggaagagtgacagcgacaggggagggcactgggccaccgagggctgccaggtgctgggcagcaagaacggcagcaccacctgccaatgcagccacctgagcagctttgcgatccttatggctcattatgacgtggaggactggaagctgaccctgatcaccagggtgggactggcgctgtcactcttctgcctgctgctgtgcatcctcactttcctgctggtgcggcccatccagggctcgcgcaccaccatacacctgcacctctgcatctgcctcttcgtgggctccaccatcttcctggccggcatcgagaacgaaggcggccaggtggggctgcgctgccgcctggtggccgggctgctgcactactgtttcctggccgccttctgctggatgagcctcgaaggcctggagctctactttcttgtggtgcgcgtgttccaaggccagggcctgagtacgcgctggctctgcctgatcggctatggcgtgcccctgctcatcgtgggcgtctcggctgccatctacagcaagggctacggccgccccagatactgctggttggactttgagcagggcttcctctggagcttcttgggacctgtgaccttcatcattttgtgcaatgctgtcattttcgtgactaccgtctggaagctcactcagaagttttctgaaatcaatccagacatgaagaaattaaagaaggcgagggcgctgaccatcacggccatcgcgcagctcttcctgttgggctgcacctgggtctttggcctgttcatcttcgacgatcggagcttggtgctgacctatgtgtttaccatcctcaactgcctgcagggcgccttcctctacctgctgcactgcctgctcaacaagaaggttcgggaagaataccggaagtgggcctgcctagttgctggggggagcaagtactcagaattcacctccaccacgtctggcactggccacaatcagacccgggccctcagggcatcagagtccggcatatgaaggcgcatggttctggacggcccagcagctcctgtggccacagcagctttgtacacgaagaccatccatcctcccttcgtccaccactctactccctccaccctccctccctgatcccgtgtgccaccaggagggagtggcagctatagtctggcaccaaagtccaggacacccagtggggtggagtcggagccactggtcctgctgctggctgcctctctgctccaccttgtgacccagggtggggacaggggctggcccagggctgcaatgcagcatgttgccctggcacctgtggccagtactcgggacagactaagggcgcttgtcccatcctggacttttcctctcatgtctttgctgcagaactgaagagactaggcgctggggctcagcttccctcttaagctaagactgatgtcagaggccccatggcgaggccccttggggccactgcctgaggctcacggtacagaggcctgccctgcctggccgggcaggaggttctcactgttgtgaaggttgtagacgttgtgtaatgtgtttttatctgttaaaatttttcagtgttgacacttaaaattaaacacatgcatacag

SEQ ID NO: 258 - DNA, 2933 bp, Homo sapiens
cggacgcgtgggtcgacccacgcgtccggacgggacagccctgtcccactcactctttcccctgccgctcctgccggcagctccaaccatgggaggccgcgtctttctcgcattctgtgtctggctgactctgccgggagctgaaacccaggactccaggggctgtgcccggtggtgccctcagaactcctcgtgtgtcaatgccaccgcctgtcgctgcaatccagggttcagctctttttctgagatcatcaccaccccgacggagacttgtgacgacatcaacgagtgtgcaacaccgtcgaaagtgtcatgcggaaaattctcggactgctggaacacagaggggagctacgactgcgtgtgcagcccgggatatgagcctgtttctggggcaaaaacattcaagaatgagagcgagaacacctgtcaagatgtggacgagtgcagctccgggcagcatcagtgtgacagctccaccgtctgcttcaacaccgtgggttcatacagctgccgctgccgcccaggctggaagcccagacacggaatcccgaataaccaaaaggacactgtctgtgaagatatgactttctccacctggaccccgccccctggagtccacagccagacgctttcccgattcttcgacaaagtccaggacctgggcagagactccaagacaagctcagccgaggtcaccatccagaatgtcatcaaattggtggatgaactgatggaagctcctggagacgtagaggccctggcgccacctgtccggcacctcatagccacccagctgctctcaaaccttgaagatatcatgaggatcctggccaagagcctgcctaaaggccccttcacctacatttccccttcgaacacagagctgaccctgatgatccaggagcggggggacaagaacgtcactatgggtcagagcagcgcacgcatgaagctgaattgggctgtggcagctggagccgaggatccaggccccgccgtggcgggcatcctctccatccagaacatgacgacattgctggccaatgcctccttgaacctgcattccaagaagcaagccgaactggaggagatatatgaaagcagcatccgtggtgtccaactcagacgcctctctgccgtcaactccatctttctgagccacaacaacaccaaggaactcaactcccccatccttttcgccttctcccaccttgagtcctccgatggggaggcgggaagagaccctcctgccaaggacgtgatgcctgggccacggcaggagctgctctgtgccttctggaagagtgacagcgacaggggagggcactgggccaccgagggctgccaggtgctgggcagcaagaacggcagcaccacctgccaatgcagccacctgagcagctttgcgatccttatggctcattatgacgtggaggactggaagctgaccctgatcaccagggtgggactggcgctgtcactcttctgcctgctgctgtgcatcctcactttcctgctggtgcggcccatccagggctcgcgcaccaccatacacctgcacctctgcatctgcctcttcgtgggctccaccatcttcctggccggcatcgagaacgaaggcggccaggtggggctgcgctgccgcctggtggccgggctgctgcactactgtttcctggccgccttctgctggatgagcctcgaaggcctggagctctactttcttgtggtgcgcgtgttccaaggccagggcctgagtacgcgctggctctgcctgatcggctatggcgtgcccctgctcatcgtgggcgtctcggctgccatctacagcaagggctacggccgccccagatactgctggttggactttgagcagggcttcctctggagcttcttgggacctgtgaccttcatcattttgtgcaatgctgtcattttcgtgactaccgtctggaagctcactcagaagttttctgaaatcaatccagacatgaagaaattaaagaaggcgagggcgctgaccatcacggccatcgcgcagctcttcctgttgggctgcacctgggtctttggcctgttcatcttcgacgatcggagcttggtgctgacctatgtgtttaccatcctcaactgcctgcagggcgccttcctctacctgctgcactgcctgctcaacaagaaggttcgggaagaataccggaagtgggcctgcctagttgctggggggagcaagtactcagaattcacctccaccacgtctggcactggccacaatcagacccgggccctcagggcatcagagtccggcatatgaaggcgcatggttctggacggcccagcagctcctgtggccacagcagctttgtacacgaagaccatccatcctcccttcgtccaccactctactccctccaccctccctccctgatcccgtgtgccaccaggagggagtggcagctatagtctggcaccaaagtccaggacacccagtggggtggagtcggagccactggtcctgctgctggctgcctctctgctccaccttgtgacccagggtggggacaggggctggcccagggctgcaatgcagcatgttgccctggcacctgtggccagtactcgggacagactaagggcgcttgtcccatcctggacttttcctctcatgtctttgctgcagaactgaagagactaggcgctggggctcagcttccctcttaagctaagactgatgtcagaggccccatggcgaggccccttggggccactgcctgaggctcacggtacagaggcctgccctgcctggccgggcaggaggttctcactgttgtgaaggttgtagacgttgtgtaatgtgtttttatctgttaaaatttttcagtgttgacacttaaaattaaacacatgcatacagaaaaaaaaaaaaaaaa

SEQ ID NO: 259 - DNA, 2807 bp, Homo sapiens
acagctgcctagcctgtggagacgggacagccctgtcccactcactctttcccctgccgctcctgccggcagctccaaccatgggaggccgcgtctttctcgcattctgtgtctggctcagctctttttctgagatcatcaccaccccgacggagacttgtgacgacatcaacgagtgtgcaacaccgtcgaaagtgtcatgcggaaaattctcggactgctggaacacagaggggagctacgactgcgtgtgcagcccgggatatgagcctgtttctggggcaaaaacattcaagaatgagagcgagaacacctgtcaagatgtggacgagtgcagctccgggcagcatcagtgtgacagctccaccgtctgcttcaacaccgtgggttcatacagctgccgctgccgcccaggctggaagcccagacacggaatcccgaataaccaaaaggacactgtctgtgaagatatgactttctccacctggaccccgccccctggagtccacagccagacgctttcccgattcttcgacaaagtccaggacctgggcagagactccaaggcaagctcagccgaggtcaccatccagaatgtcatcaaattggtggatgaactgatggaagctcctggagacgtagaggccctggcgccacctgtccggcacctcatagccacccagctgctctcaaaccttgaagatatcatgaggatcctggccaagagcctgcctaaaggccccttcacctacatttccccttcgaacacagagctgaccctgatgatccaggagcggggggacaagaacgtcactatgggtcagagcagcgcacgcatgaagctgaattgggctgtggcagctggagccgaggatccaggccccgccgtggcgggcatcctctccatccagaacatgacgacattgctggccaatgcctccttgaacctgcattccaagaagcaagccgaactggaggagatatatgaaagcagcatccgtggtgtccaactcagacgcctctctgccgtcaactccatctttctgagccacaacaacaccaaggaactcaactcccccatccttttcgccttctcccaccttgagtcctccgatggggaggcgggaagagaccctcctgccaaggacgtgatgcctgggccacggcaggagctgctctgtgccttctggaagagtgacagcgacaggggagggcactgggccaccgagggctgccaggtgctgggcagcaagaacggcagcaccacctgccaatgcagccacctgagcagctttgcgatccttatggctcattatgacgtggaggactggaagctgaccctgatcaccagggtgggactggcgctgtcactcttctgcctgctgctgtgcatcctcactttcctgctggtgcggcccatccagggctcgcgcaccaccatacacctgcacctctgcatctgcctcttcgtgggctccaccatcttcctggccggcatcgagaacgaaggcggccaggtggggctgcgctgccgcctggtggccgggctgctgcactactgtttcctggccgccttctgctggatgagcctcgaaggcctggagctctactttcttgtggtgcgcgtgttccaaggccagggcctgagtacgcgctggctctgcctgatcggctatggcgtgcccctgctcatcgtgggcgtctcggctgccatctacagcaagggctacggccgccccagatactgctggttggactttgagcagggcttcctctggagcttcttgggacctgtgaccttcatcattttgtgcaatgctgtcattttcgtgactaccgtctggaagctcactcagaagttttctgaaatcaatccagacatgaagaaattaaagaaggcgagggcgctgaccatcacggccatcgcgcagctcttcctgttgggctgcacctgggtctttggcctgttcatcttcgacgatcggagcttggtgctgacctatgtgtttaccatcctcaactgcctgcagggcgccttcctctacctgctgcactgcctgctcaacaagaaggttcgggaagaataccggaagtgggcctgcctagttgctggggggagcaagtactcagaattcacctccaccacgtctggcactggccacaatcagacccgggccctcagggcatcagagtccggcatatgaaggcgcatggttctggacggcccagcagctcctgtggccacagcagctttgtacacgaagaccatccatcctcccttcgtccaccactctactccctccaccctccctccctgatcccgtgtgccaccaggagggagtggcagctatagtctggcaccaaagtccaggacacccagtggggtggagtcggagccactggtcctgctgctggctgcctctctgctccaccttgtgacccagggtggggacaggggctggcccagggctgcaatgcagcatgttgccctggcacctgtggccagtactcgggacagactaagggcgcttgtcccatcctggacttttcctctcatgtctttgctgcagaactgaagagactaggcgctggggctcagcttccctcttaagctaagactgatgtcagaggccccatggcgaggccccttggggccactgcctgaggctcacggtacagaggcctgccctgcctggccgggcaggaggttctcactgttgtgaaggttgtagacgttgtgtaatgtgtttttatctgttaaaatttttcagtgttgacacttaaaattaaacacatgcatacagaag

SEQ ID NO: 260 - DNA, 3156 bp, Homo sapiens
ctgtcccactcactctttcccctgccgctcctgccggcagctccaaccatgggaggccgcgtctttctcgcattctgtgtctggctgactctgccgggagctgaaacccaggactccaggggctgtgcccggtggtgccctcagaactcctcgtgtgtcaatgccaccgcctgtcgctgcaatccagggttcagctctttttctgagatcatcaccaccccgacggagacttgtgacgacatcaacgagtgtgcaacaccgtcgaaagtgtcatgcggaaaattctcggactgctggaacacagaggggagctacgactgcgtgtgcagcccgggatatgagcctgtttctgggacaaaaacattcaagaatgagagcgagaacacctgtcaagatgtggacgaatgtcagcagaacccaaggctctgtaaaagctacggcacctgcgtcaacacccttggcagctatacctgccagtgcctgcctggcttcaagttcatacctgaggatccgaaggtctgcacagatgtgaatgaatgcacctccggacaaaatccgtgccacagctccacccactgcctcaacaacgtgggcagctatcagtgtcgctgccgaccgggctggcaaccgattccggggtcccccaatggcccaaacaataccgtctgtgaagatgtggacgagtgcagctccgggcagcatcagtgtgacagctccaccgtctgcttcaacaccgtgggttcatacagctgccgctgccgcccaggctggaagcccagacacggaatcccgaataaccaaaaggacactgtctgtgaagatatgactttctccacctggaccccgccccctggagtccacagccagacgctttcccgattcttcgacaaagtccaggacctgggcagagactccaagacaagctcagccgaggtcaccatccagaatgtcatcaaattggtggatgaactgatggaagctcctggagacgtagaggccctggcgccacctgtccggcacctcatagccacccagctgctctcaaaccttgaagatatcatgaggatcctggccaagagcctgcctaaaggccccttcacctacatttccccttcgaacacagagctgaccctgatgatccaggagcggggggacaagaacgtcactatgggtcagagcagcgcacgcatgaagctgaattgggctgtggcagctggagccgaggatccaggccccgccgtggcgggcatcctctccatccagaacatgacgacattgctggccaatgcctccttgaacctgcattccaagaagcaagccgaactggaggagatatatgaaagcagcatccgtggtgtccaactcagacgcctctctgccgtcaactccatctttctgagccacaacaacaccaaggaactcaactcccccatccttttcgccttctcccaccttgagtcctccgatggggaggcgggaagagaccctcctgccaaggacgtgatgcctgggccacggcaggagctgctctgtgccttctggaagagtgacagcgacaggggagggcactgggccaccgagggctgccaggtgctgggcagcaagaacggcagcaccacctgccaatgcagccacctgagcagctttgcgatccttatggctcattatgacgtggaggactggaagctgaccctgatcaccagggtgggactggcgctgtcactcttctgcctgctgctgtgcatcctcactttcctgctggtgcggcccatccagggctcgcgcaccaccatacacctgcacctctgcatctgcctcttcgtgggctccaccatcttcctggccggcatcgagaacgaaggcggccaggtggggctgcgctgccgcctggtggccgggctgctgcactactgtttcctggccgccttctgctggatgagcctcgaaggcctggagctctactttcttgtggtgcgcgtgttccaaggccagggcctgagtacgcgctggctctgcctgatcggctatggcgtgcccctgctcatcgtgggcgtctcggctgccatctacagcaagggctacggccgccccagatactgctggttggactttgagcagggcttcctctggagcttcttgggacctgtgaccttcatcattttgtgcaatgctgtcattttcgtgactaccgtctggaagctcactcagaagttttctgaaatcaatccagacatgaagaaattaaagaaggcgagggcgctgaccatcacggccatcgcgcagctcttcctgttgggctgcacctgggtctttggcctgttcatcttcgacgatcggagcttggtgctgacctatgtgtttaccatcctcaactgcctgcagggcgccttcctctacctgctgcactgcctgctcaacaagaaggttcgggaagaataccggaagtgggcctgcctagttgctggggggagcaagtactcagaattcacctccaccacgtctggcactggccacaatcagacccgggccctcagggcatcagagtccggcatatgaaggcgcatggttctggacggcccagcagctcctgtggccacagcagctttgtacacgaagaccatccatcctcccttcgtccaccactctactccctccaccctccctccctgatcccgtgtgccaccaggagggagtggcagctatagtctggcaccaaagtccaggacacccagtggggtggagtcggagccactggtcctgctgctggctgcctctctgctccaccttgtgacccagggtggggacaggggctggcccagggctgcaatgcagcatgttgccctggcacctgtggccagtactcgggacagactaagggcgcttgtcccatcctggacttttcctctcatgtctttgctgcagaactgaagagactaggcgctggggctcagcttccctcttaagctaagactgatgtcagaggccccatggcgaggccccttggggccactgcctgaggctcacggtacagaggcctgccctgcctggccgggcaggaggttctcactgttgtgaaggttgtagacgttgtgtaatgtgtttttatctgttaaaatttttcagtgttgacacttaaaattaaacacatgcatacag

SEQ ID NO: 261 - DNA, 2921 bp, Homo sapiens
agcctgtggagacgggacagccctgtcccactcactctttcccctgccgctcctgccggcagctccaaccatgggaggccgcgtctttctcgcattctgtgtctggctgactctgccgggagctgaaacccaggactccaggggctgtgcccggtggtgccctcagaactcctcgtgtgtcaatgccaccgcctgtcgctgcaatccagggttcagctctttttctgagatcatcaccaccccgacggagacttgtgacgacatcaacgagtgtgcaacaccgtcgaaagtgtcatgcggaaaattctcggactgctggaacacagaggggagctacgactgcgtgtgcagcccgggatatgagcctgtttctggggcaaaaacattcaagaatgagagcgagaacacctgtcaagatgtggacgagtgcagctccgggcagcatcagtgtgacagctccaccgtctgcttcaacaccgtgggttcatacagctgccgctgccgcccaggctggaagcccagacacggaatcccgaataaccaaaaggacactgtctgtgaagatatgactttctccacctggaccccgccccctggagtccacagccagacgctttcccgattcttcgacaaagtccaggacctgggcagagactccaagacaagctcagccgaggtcaccatccagaatgtcatcaaattggtggatgaactgatggaagctcctggagacgtagaggccctggcgccacctgtccggcacctcatagccacccagctgctctcaaaccttgaagatatcatgaggatcctggccaagagcctgcctaaaggccccttcacctacatttccccttcgaacacagagctgaccctgatgatccaggagcggggggacaagaacgtcactatgggtcagagcagcgcacgcatgaagctgaattgggctgtggcagctggagccgaggatccaggccccgccgtggcgggcatcctctccatccagaacatgacgacattgctggccaatgcctccttgaacctgcattccaagaagcaagccgaactggaggagatatatgaaagcagcatccgtggtgtccaactcagacgcctctctgccgtcaactccatctttctgagccacaacaacaccaaggaactcaactcccccatccttttcgccttctcccaccttgagtcctccgatggggaggcgggaagagaccctcctgccaaggacgtgatgcctgggccacggcaggagctgctctgtgccttctggaagagtgacagcgacaggggagggcactgggccaccgaggtctgccaggtgctgggcagcaagaacggcagcaccacctgccaatgcagccacctgagcagctttacgatccttatggctcattatgacgtggaggactggaagctgaccctgatcaccagggtgggactggcgctgtcactcttctgcctgctgctgtgcatcctcactttcctgctggtgcggcccatccagggctcgcgcaccaccatacacctgcacctctgcatctgcctcttcgtgggctccaccatcttcctggccggcatcgagaacgaaggcggccaggtggggctgcgctgccgcctggtggccgggctgctgcactactgtttcctggccgccttctgctggatgagcctcgaaggcctggagctctactttcttgtggtgcgcgtgttccaaggccagggcctgagtacgcgctggctctgcctgatcggctatggcgtgcccctgctcatcgtgggcgtctcggctgccatctacagcaagggctacggccgccccagatactgctggttggactttgagcagggcttcctctggagcttcttgggacctgtgaccttcatcattttgtgcaatgctgtcattttcgtgactaccgtctggaagctcactcagaagttttctgaaatcaatccagacatgaagaaattaaagaaggcgagggcgctgaccatcacggccatcgcgcagctcttcctgttgggctgcacctgggtctttggcctgttcatcttcgacgatcggagcttggtgctgacctatgtgtttaccatcctcaactgcctgcagggcgccttcctctacctgctgcactgcctgctcaacaagaaggttcgggaagaataccggaagtgggcctgcctagttgctggggggagcaagtactcagaattcacctccaccacgtctggcactggccacaatcagacccgggccctcagggcatcagagtccggcatatgaaggcgcatggttctggacggcccagcagctcctgtggccacagcagctttgtacacgaagaccatccatcctcccttcgtccaccactctactccctccaccctccctccctgatcccgtgtgccaccaggagggagtggcagctatagtctggcaccaaagtccaggacacccagtggggtggagtcggagccactggtcctgctgctggctgcctctctgctccaccttgtgacccagggtggggacaggggctggcccagggctgcaatgcagcatgttgccctggcacctgtggccagtactcgggacagactaagggcgcttgtcccatcctggacttttcctctcatgtctttgctgcagaactgaagagactaggcgctggggctcagcttccctcttaagctaagactgatgtcagaggccccatggcgaggccccttggggccactgcctgaggctcacggtacagaggcctgccctgcctggccgggcaggaggttctcactgttgtgaaggttgtagacgttgtgtaatgtgtttttatctgttaaaatttttcagtgttgacacttaaaattaaacacatgcatacagaaaaaaaaaaaaaaaaaaaaaa

SEQ ID NO: 262 - DNA, 5506 bp, Homo sapiens
ctgcagcctcgaactcctgggctcaagcaatcttcctacctcagcctcttgaatagctgggactacaggtgtgcgccaccacgctcagctaatttttgaacttttttgtagagatgaggtctccctatattgcccaggctggtctcttaactcctgggctcaagtgatcctccttcctcagcttcccaaagcgctgggattacaggcatgagccaccatgcctggccaatgcaggtgaggtttttagtgtccagctaaggcgaccccttccctttgcaaaaaagggagactgaaaatcatcaagttaagagcccagagaatatcagggtggtctgggatgtttcaagggctggtctgaaagaaattggaggtggcacgcagggcagggttgcggggccaactgggaggccccagcaacataaaggaaaagttgttggggctgaggaggcttgctgagagaggggaagtgagggaaagaggtgatctagggacacggtgtgaatgagggggggatgagatcacagggttattactgggagacccctgagggaagatggccacagggacaggacgaggctgtcctctgagtggggaaaggagctatggtagtctgaggaccccccagagtcagggagattgggaggtgagggtgctgaatggtaaagggcttcggagctaagggaaatggtcaggaccccacctgaccccaacgcccacgggccaggggcagaggagaaaaacctgggtgggcagaaggaggcaatcttccaggggaaggctcaggaggagggagatcaacatcaacctgccccgccccctccccagcctgataaaggtcctgcgggcaggacaggacctcccaaccaagccctccagcaaggattcaggttgttgagtgcttgggagggacacccgcctccactctgcaagaactcataaagggagatgaggggatcgtgggagggagggaggagggtgccactgatcccctgaacccctgcctccgcctccagggtgcccctccggcctcgccatgaggctcttcctgtcgctcccggtcctggtggtggttctgtcgatcgtcttggaaggtaaaagtgggatgggagaattgcggagttggagatttggaagagtgaaggtggctacaggcctggggtcccggcttagaggacctctgagagctctggggccccttcttggtcgtggttgccccattgtggtcgagtgggtctccaggttcgcccaggctcagtccggcaggcgccaaatctgcccaggagagccctagtaaccgatgacgtatggatctccacacctctgggattggctgtcctccttttatagccttgaaagtgggtgatggggcgatgggctgtggaggaggtcagtgctgagtaaggcaattcccagcggcttgagccccacgcggtcacttcagtatcctccccattctaaccacatgatccccaaggatctccttatctatccccgggatcccaccccaagggggttccaataacaaatttttggtggggcgtggcggctaatgcctgtaatcccagcactttgggaggccgaggcgggcagatcacttgaggtcaggagttcgaaaccagcctggcctacatggtgaaaccccatctctactaaaaatacaaaacagccaggcgttgtggtgcgcgcttggctacttgggaggctgagacaggagaactgcttgaacctaggaggcggaggttgcagtaagccgagatcgcaccatttgacacagcaagtctccgtctcaaaactacaacaacaacaacaacaacaaccaaattttgcacccctgcctcatcttcctggcaggcccagccccagcctagggggctccagaagtctccaacccctttgatggcctggaggagttaggaaagaccctggaggactacactcgggaattcatcaaccgcatcacacagagtgaacttcctgccaagatgtggttagaacccttcccagggcacgggagggctggggtgtgtttgtgtggagccctggaggatgtccaagatgaacagattgaaaaaaaaaacaagtcccagagaggctgacagcatccttctggtcacacagctagatctcaaggatctcagacgtcagggacagtttcccggactcccatccaggccacattttaaaagatggtcttgggctgggcgccgtggctcacacctataatcctaacactttgggaggcctaggcgggcggattgcctgagatcaggagttcaagaccagcctggccaacatggtgaaaccctgtctctactaaaagtacaaaaaattagcctgacatgggggtgtgcacctgtaatcccagctactcgggaggctgaggcaggggaattgcttgcaccagtaaggtgggggttacagtgagccaagattgcaccactgcactccagcctgggcaacaaagcaacattccgtcacaaaagaaaaaaaaaaaagatggttttgcttaggtacggtggctcacacctgtaatcccagcactgtgggaggattgctggagcctaggagtttgagaccagcttggctaacatggcgagatcctgtctctatttttttttttttttttttgagacagagtctcgctctgttgccaggctggagtgcagtggcgccatctcggctcacgcaacctctgcctccccagttcaagcaattctctgcctcagtctcctgagtagctaggattacaggcgcccaccaccacgcccggctaatttttttgtatttttagtagagatggggtttcaccatcttggccaagctggtcttgaactcctgaccttgtgatccacccgcctcagcctcccaaagtgctgggattacaggtgtgagccaccatgcccggtgatcctgtctctatttaaaaaacaaaacaaaacaaaacaaaacaaaaagcatacaagccagccccggtgcgatagctcatgcctgtaatcccagcactttgggaggctgagtcgggcagattacctgagatcgggggttcgaggccaagttgggcagatcacctgaggttgggagtttgagaccagcctgaccaacatggagaaactccgtctctattaaaaatacaaaattagtcaggcatggtggtgcatgcctctattcccagctacttgggaggctgaggcaggagaatcacttgaacctgggaggcggaggttgcagtgagctgagataatgccattgcactccagcctgggcaataagagcgaatccacgtctcaaaaaaaaaaaaaaaaattgaaaaaaaaaaagatggtcttgtggggtaatgaaggacacaagcttggtgggacctgagtccccaggctggcatagagccccttactccctgtgtgatcttaagagagaggcattactgtgagcctcagtttcctttcctgtgaaatggtggttctgtggggaagtaaagcagaaggcctatagggtgtctggcacattgtaaatgctcagtacatcttcaaatccacacttgctccctttggcaagttagagagtcattcgttcctcaacacatatttattgagcatctgctaagtgctagaaactgtttcaatgtggggaataaaacagtgaagaatatgccgagcgcggtggctcacacctgtaatcccagcactttggaaggctgaggtgagtggatcacttgaggtcaggagtttgagaaccccatctctactagaaatacaaaaaattacccaggcgtgatggcacacacctgtagtcccagctacttcggagacggaggcaagaggatcacttgagcccaggaggttgaggctgcagtgagctatgtttgtgccactgcattccagcctgggtaacagaatgagaccctgtctcatccaaaaaaaaaagaaagaaagaaagaaagaaagaaggaagggagggagggagggagggaaaatctagtcaggcctaaacttagaaagattgtttggaggccaggtgcagtggctcatgcctgtaatcccagcactttggcaggctgaggcgggcagatcacctgaggtcaggagtttgagaccagcctgaccaacaaggagaaaccctgtctcttctaaaaaaaaaatacaaaaaattagccaggcatggtggtgcatgccgtaatcccagctactcaggatgatgaggcaggagaattgcttgaacctgggagctggaggttgcggtgagctgagatcgcgccattgcactccagcctgggcaacaagggcataactccgtctcaaaaaaagaaagaaagaaagaaagattgattgtttggagggagaggcaaaggtccaaagtcaagaaggtcgatcaataagcaagagcgggtggcatcccaggcaggggaacagcctgggcatacgcagggaggctggaaagtacctttgaatgagtaggggaacagatagggcaagggcaggctggaagaaagagtgggtagcaagagatggcaggccttgaaagccaggccagagtgaagttttcttttcttttcttttcttttgagacggagtcacgctctgttgcctgggctggaacacggtggtgtgatctcagctcattgcactctccacctcccaggttcaagcaattctcctgcctcagcctcctgagtagctgggattacaggcgtgcaccaccacgggtggctaatttttgtaatttagtaaagacggggttttgccatgttggccaggctggtctcgaactcctgacctccagtgatctgcctgcctcggcttcccaaagtgttgggattacaggcgtgagccaaatgcccagccaagggtaaagtgtttagacttcaacgtgctttggtccacctgggaaactgaggcacagaagttggcccacccagcccagcggtcctcctaatcccacagacagtggggatggagattcagcaaggggaagaggtgggagtcaggtagcaggtagaatttgaacagcctgggaggtagctgcacacagtgacccccttccttattcctccccacagggattggttttcagagacatttcggaaagtgaaggagaaactcaagactgactcatgaggacctgaagggtgacatcccaggaggggcctctgaaatttccaacaccccagcgcctgtactgaggacgccctccatgtgtgtccaatgtggtcacacgcccaggtgtgaccaataaaaatcctatggaaaattctctctggccaggcatggtggctgacgcctgtaatcccagcactttgggaggctgaggcgggcggatcacaaggtcaggagattgagcccatcctggctaacacggtgaaaccccgtctctactaaaaatacaaaaaaaatagccaagcgtggtggcaggcgcctgtagtcccagctattcgggaggctgaggcaggagaatcgcttgaaaccgggaggtggagcttgcagtgagctgagatcgtgccactgcactgcag

SEQ ID NO: 263 - DNA, 2366 bp, Homo sapiens
gaccacgcgtatcgatgtcgacccacaggattgtcacagagggcagggtggtgactgaggaccagctcctcatgcttgaggctgtggtgatgcacctcgggatccgctctgcccgctgtgtcctgggcatggagggtcagcaggtcatcctgcacctgcccctatcccagaaggggcccttctggacatgggagcctagtgcccctcgaactctgctccaggtcctacaggatccagccctgaaagacctcgtcctcacctgccccaccctgccctggcattccctgatcctgcggccccagtatgagatccaagccatcatgcacatgcgcaggaccattgtcaagatcccttctaccctggaggtcgacgtggaggacgtcaccgcctcctcccggcacgtccactttatcaaaccgctgctgctgagcgaggtcctggcctgggaaggccctttccccctgtccatggagatcctggaggttcctgagggccgccccatcttcctcagcccgtgggtgggctccttgcaaaaaggccagaggctttgcgtctatggcctagcctcaccaccctggcgggtcctggcctcaagcaagggccgcaaggtgcccaggcacttcctggtgtcagggggctaccaaggcaagctgcggcggcggccaagggagttccccacggcctatgacctcctaggtgctttccagccaggccggccactccgggtggtggccacaaaggactgtgagggcgagagggaggagaatcccgagttcacgtccctggctgtgggtgaccggctggaggtgctggggcctggccaggcccatggggcccagggcagtgacgtggatgtcttggtttgtcagcggctgagtgaccaggctggggaagatgaggaggaagagtgcaaagaggaggcagagacccagagcgggtcctgctgcccttccacttccctggcagtttcgtggaggagatgagtgacagccggcgctacagcctggcagatctgactgcccagttttcaatgccttgtgaggtcaaggtggtggccaaggacaccagccaccccaatgaccctcagaacctccttcctgggcctgcggctggaggagaagatcacagagccattcttggtggtgagcctggactctgagctgggatgtgctttgagatccctccccggaggctggacctgactgtcgtggaggccaaggggcagccagacttgccagaggggtctctccccatagccacagtggaggaagctggaacagacaccttttattattgtcttcggaagttaccagcctgtgagatccaagcccccccacccaggccccctaaaaatcagggcctcagcaagcagaggagacacagcagtgagggaggcgtcaagtcttctcaagtcttaggattgcagcaacacgttcggctgcccaaacccaaggcgaagaccttgccagagttcatcaaggatggctccagtacgtacagcaagattcctgcccacaggaagggccacaggcccgctaagccccaaaggcaggatctagatgatgatgaacatgattatgaagaaatacttgagcaatttcagaaaaccatctaagtgctggaggaaccacgcttcctaactgctgcttctcagggaatccgacaccagccaaccattttaagcctctaaaagacctcgggcaagtctcacagaaactgagctgcagacggggagtagctttgtggaaactgatttgatggacactgcaccagcttccttcaggttctagattcttgctacttagggcgggctggtttggacctaacatctcgcacgtgactccctcagcctcagagccttgggatgcagagcagctggcagggttcctctcaatcctgcaaccccagctgtcccaccggtggatgcagaggggaatccgaggccatcaaccttggtgacagcagcgcagtgccaatgctgatcacactgcatgggagattttgttaacgtctgccacccccactctcacccccaagctctaagcccccgggaggcctggactgtcttcctcatctctgtagcaccaagcctgatagatctgtatatggtaaacaggggtttaaccacatgtggttaacatggattaatgtgggaatttggcttcaagaacacaaccttaggaccttgggccccaaaagctggtggtgaaatgagaggagccaatttaagaagacccttatggagacctgaggctgcagaaactggtaggtttcatcaggtggttaaagtcgtcaaagttgtaagtgactaaccaagattatttcattttaaaaccacagaataaaaatgacacctgagcttctcc

SEQ ID NO: 264 - DNA, 2366 bp, Homo sapiens; identical to SEQ ID NO: 263

SEQ ID NO: 265 - DNA, 1005 bp, Homo sapiens
tctgcccgctgtgtcctgggcatggagggtcagcaggtcatcctgcacctgcccctatcccagaaggggcccttctggacatgggagcctagtgcccctcgaactctgctccaggtcctacaggatccagccctgaaagacctcgtcctcacctgccccaccctgccctggcattccctgatcctgcggccccagtatgagatccaagccatcatgcacatcttctcaagtcttaggattgcagcaacacgctcggctgcccaaacccaaggcgaagaccttgccagagttcatcaaggatggctccagtacgtacagcaagattcctgcccacaggaagggccacaggcccgctaagccccaaaggcaggatctagatgatgatgaacatgattatgaagaaatacttgagcaatttcagaaaaccatctaagtgctggaggaaccacgcttcctaactgctgcttctcagggaatccgacaccagccaaccattttaagcctctaaaagacctcgggcaagtctcacagaaactgagctgcagacggggagtagctttgtggaaactgatttgatggacactgcaccagcttccttcaggttctagattcttgctacttagggcgggctggtttggacctaacatctcgcacgtgactccctcagcctcagagccttgggatgcagagcagctggcagggttcctctcaatcctgcaaccccagctgtcccaccggtggatgcagaggggaatccgaggccatcaaccttggtgacagcagcgcagtgccaatgctgatcacactgcatgggagattttgttaacgtctgccacccccactctcacccccaagctctaagcccccgggaggcctggactgtcttcctcatctctgtagcaccaagcctgatagatctgtatatggtaaacaggggtttaaccacatgtggttaacatggattaatgtgggaatttggcttcaagaacacaaccttaggacctt

SEQ ID NO: 266 - DNA, 1929 bp, Homo sapiens
gaccacgcgtatcgatgtcgacccacaggattgtcacagagggcagggtggtgactgaggaccagctcctcatgcttgaggctgtggtgatgcacctcgggatccgctctgcccgctgtgtcctgggcatggagggtcagcaggtcatcctgcacctgcccctatcccagaaggggcccttctggacatgggagcctagtgcccctcgaactctgctccaggtcctacaggatccagccctgaaagacctcgtcctcacctgccccaccctgccctggcattccctgatcctgcggccccagtatgagatccaagccatcatgcacatgcgcaggaccattgtcaagatcccttctaccctggaggtcgacgtggaggacgtcaccgcctcctcccggcacgtccactttatcaaaccgctgctgctgagcgagcggctgagtgaccaggctggggaggatgaggaggaagagtgcaaagaggaggcagagagcccagagcgggtcctgctgcccttccacttccctggcagtttcgtggaggagatgagtgacagccggcgctacagcctggcagatctgactgcccagttttcactgccttgtgaggtcaaggtggtggccaaggacaccagccaccccactgaccctctgacctccttcctgggcctgcggctggaggagaagatcacagagccattcttggtggtgagcctggactctgagcctgggatgtgctttgagatccctccccggtggctggacctgactgtcgtggaggccaaggggcagccagacttgccagaggggtctctccccatagccacagtggaggagctgacagacaccttctattatcgtcttcggaagttaccagcctgtgagatccaagcccccccacccaggccccctaaaaatcagggcctcagcaagcagaggagacacagcagtgagggaggcgtcaagtcttctcaagtcttaggattgcagcaacacgctcggctgcccaaacccaaggcgaagaccttgccagagttcatcaaggatggctccagtacgtacagcaagattcctgcccacaggaagggccacaggcccgctaagccccaaaggcaggatctagatgatgatgaacatgattatgaagaaatacttgagcaatttcagaaaaccatctaagtgctggaggaaccacgcttcctaactgctgcttctcagggaatccgacaccagccaaccattttaagcctctaaaagacctcgggcaagtctcacagaaactgagctgcagacggggagtagctttgtggaaactgatttgatggacactgcaccagcttccttcaggttctagattcttgctacttagggcgggctggtttggacctaacatctcgcacgtgactccctcagcctcagagccttgggatgcagagcagctggcagggttcctctcaatcctgcaaccccagctgtcccaccggtggatgcagaggggaatccgaggccatcaaccttggtgacagcagcgcagtgccaatgctgatcacactgcatgggagattttgttaacgtctgccacccccactctcacccccaagctctaagcccccgggaggcctggactgtcttcctcatctctgtagcaccaagcctgatagatctgtatatggtaaacaggggtttaaccacatgtggttaacatggattaatgtgggaatttggcttcaagaacacaaccttaggaccttgggccccaaaagctggtggtgaaatgagaggagccaatttaagaagacccttatggagacctgaggctgcagaaactggtaggtttcatcaggtggttaaagtcgtcaaagttgtaagtgactaaccaagattatttcattttaaaaccacagaataaaaatgacacctgagcttctcc

SEQ ID NO: 267 - DNA, 1644 bp, Homo sapiens
gagccggtgccgctgcaggacttcgtgcgcgccttggaccccgcctccctcccgcgcgtgctgcgggtctgctcgggggtctacttcgagggctccatctatgagatctctgggaatgagtgctgcctctccacgggggacctgatcaaggtcacccaggtccgcctccagaaggtggtctgtgagaacccgaagaccagccagaccatggagctcgcccccaacttccagggctacttcacccccctcaacaccccacagagctatgaaaccctggaggagctggtctctgccacaactcagagctccaagcagctgcccacttgcttcatgtcgacccacaggattgtcacagagggcagggtggtgactgaggaccagctcctcatgcttgaggctgtggtgatgcacctcgggatccgctctgcccgctgtgtcctgggcatggagggtcagcaggtcatcctgcacctgcccctatcccagaaggggcccttctggacatgggagcctagtgcccctcgaactctgctccaggtcctacaggatccagccctgaaagacctcgtcctcacctgccccaccctgccctggcattccctgatcctgcggccccagtatgagatccaagccatcatgcacatcttctcaagtcttaggattgcagcaacacgctcggctgcccaaacccaaggcgaagaccttgccagagttcatcaaggatggctccagtacgtacagcaagattcctgcccacaggaagggccacaggcccgctaagccccaaaggcaggatctagatgatgatgaacatgattatgaagaaatacttgagcaatttcagaaaaccatctaagtgctggaggaaccacgcttcctaactgctgcttctcagggaatccgacaccagccaaccattttaagcctctaaaagacctcgggcaagtctcacagaaactgagctgcagacggggagtagctttgtggaaactgatttgatggacactgcaccagcttccttcaggttctagattcttgctacttagggcgggctggtttggacctaacatctcgcacgtgactccctcagcctcagagccttgggatgcagagcagctggcagggttcctctcaatcctgcaaccccagctgtcccaccggtggatgcagaggggaatccgaggccatcaaccttggtgacagcagcgcagtgccaatgctgatcacactgcatgggagattttgttaacgtctgccacccccactctcacccccaagctctaagcccccgggaggcctggactgtcttcctcatctctgtagcaccaagcctgatagatctgtatatggtaaacaggggtttaaccacatgtggttaacatggattaatgtgggaatttggcttcaagaacacaaccttaggaccttgggccccaaaagctggtggtgaaatgagaggagccaatttaagaagacccttatggagacctgaggctgcagaaactggtaggtttcatcaggtggttaaagtcgtcaaagttgtaagtgactaaccaagattatttcattttaaaaccacagaataaaaatgacacctgagcttctctaaaaaaaaaaaaaaaaaaaaaaaaaaaaaaaaaaaaa

SEQ ID NO: 268 - DNA, 2861 bp, Homo sapiens
tcctaaactacttcagcaggctcttacaaaagctgtcagaaaggcctcctaactcctttcttagtcattgatggacctcagctccatcttctggaaccttctgtggctgcccatcatcatgggatgatgcaaaccccttaacatggcatccagggtcctttataagctgacttgtcgcacctccccgacccatcttcctccactcactctgctgtccacgctccagcgagagaaatgcccgcagctccctcatggcgccgggactcctgctccagagccccacacccaggccttctgccagcagtgttcttcctccttcaggctcacaggcaaggtgggactcggatttctcactcagcagcggtggtcctgcctcctcttctgtgctcccactgcacgctctacgtagctcaggacaggttgtttttagtgagtcctacctgagtctctggctgaaaagagttctgtcggggcagggaccttacctgctccaaggccagagaggacctgctaaacggggccaaacagaatcacagatgagcgggagagagccaggcatggggtcagaaagactaagtttacgttccggttcacttactctgcctgtgctgggtactcctccgagcgtcctttttctcaccagtagacctgtgatatcctctgcagctgctttctgtgacctgcttactctgtggcaggcccctgatatgctttgtcccaaccaattctcacagtgcttctgagttacacaccggtgtcctgcttcacagttgagaaggtgagaggcacagagaggtcaaatagtttacctgagatcacacagccaacaagtggcagggccagagcttgcaattgggtctgaccacacagcctgagcttctaactaccgtggtctgctgagaacgggaggggatgagacagatcaaaagtcctttactatccccagctcttgttttgggatcttgggtgactcgtatttaatcacgtgtggtaggcagcaggtggcagtggaaattacaagatgactcctgagtggtctcagccccagcaggggcttttatctgtggcgtgagcgtgggaagtcattttctgacaatggctggactgaaacatccgaaacacaggccttgtgccagtgctgaaaagggtactttccagaaccgacagaccttagcccgtgtcttggctcccagtggagggactctgggcccggtcactgctgtcgccctggaaccacaacttttcccctctgtgcgttggaatcttggtgctgatcagggagctgtgccgcacactctgtaaagcgtggtggggcgccaagacctctgcctctacaggtcacaggcgtggctctgggtccaaaccttggccctgctgtggatccccgtgtgacctttgacaaggcacactttctctcctacataaactgggaattgaaaccactcagagggtaacttgaggattaaagagcagacgtcatgtagcatctggcacatgggggaacgcaatggaagtcctctttcttctgggccacctcagctcaggcgtcgtcacaaggctttgtggctcctttcttacggtatccccactttgcttttttccccttcagcaagagaattaaaggacattgaccaaattcctaagtggaaaatcccaggaacaccctgtctccaacccccaaccctatcctcattttctaccctgatccctttctcccttgccagagaatatttcacatgcatgtagcaaaaacaccaggggtcttgagaggtcatagcctgaaaaggaagtagagagagaagcagaggaagtgacacttaacgtgaatgaccgtttttcatggactctgcttccccatttcttgagaccctgatgatttctgctttttctcccaaagtcttctcaagtcttaggattgcagcaacacgctcggctgcccaaacccaaggcgaagaccttgccagagttcatcaaggatggctccagtacgtacagcaagattcctgcccacaggaagggccacaggcccgctaagccccaaaggcaggatctagatgatgatgaacatgattatgaagaaatacttgagcaatttcagaaaaccatctaagtgctggaggaaccacgcttcctaactgctgcttctcagggaatccgacaccagccaaccattttaagcctctaaaagacctcgggcaagtctcacagaaactgagctgcagacggggagtagctttgtggaaactgatttgatggacactgcaccagcttccttcaggttctagattcttgctacttagggcgggctggtttggacctaacatctcgcacgtgactccctcagcctcagagccttgggatgcagagcagctggcagggttcctctcaatcctgcaaccccagctgtcccaccggtggatgcagaggggaatccgaggccatcaaccttggtgacagcagcgcagtgccaatgctgatcacactgcatgggagattttgttaacgtctgccacccccactctcacccccaagctctaagcccccgggaggcctggactgtcttcctcatctctgtagcaccaagcctgatagatctgtatatggtaaacaggggtttaaccacatgtggttaacatggattaatgtgggaacttggcttcaagaacacaaccttaggaccttgggccccaaaagctggtggtgaaatgaggaggagccaatttaagaagacccttatggagacctgaggctgcagaaactggtaggtttcatcaggtggttaaagtcgtcaaagttgtaagtgactaaccaagattatttcattttaaaaccatagaataaaaatgacacctgagcttctc

SEQ ID NO: 269 - DNA, 673 bp, Homo sapiens
ctggaggaaccacgcttcctaactgctgcttctcagggaatccgacaccagccaaccattttaagcctctaaaagacctcgggcaagtctcacagaaactgagctgcagacggggagtagctttgtggacctaacatctcgcacgtgactccctcagcctcagagccttgggatgcagagcagctggcagggttcctctcaatcctgcaaccccagctgtcccaccggtggatgcagaggggaatccgaggccatcaaccttggtgacagcagcgcagtgccaatgctgatcacactgcatgggagattttgttaacgtctgccacccccactctcacccccaagctctaagcccccgggaggcctggactgtcttcctcatctctgtagcaccaagcctgatagatctgtatatggtaaacaggggtttaaccacatgtggttaacatggattaatgtgggaatttggcttcaagaacacaaccttaggaccttgggccccaaaagctggtggtgaaatgagaggagccaatttaagaagacccttatggagacctgaggctgcagaaactggtaggtttcatcaggtggttaaagtcgtcaaagttgtaagtgactaaccaagattatttcattttaaaaccacagaataaaaatgacacctgagcttctc

SEQ ID NO: 270 - DNA, 4204 bp, Homo sapiens
caggacagggaagagcgggcgctatggggagccggacgccagagtcccctctccacgccgtgcagctgcgctggggcccccggcgccgacccccgctcgtgccgctgctgttgctgctcgtgccgccgccacccagggtcgggggcttcaacttagacgcggaggccccagcagtactctcggggcccccgggctccttcttcggattctcagtggagttttaccggccgggaacagacggggtcagtgtgctggtgggagcacccaaggctaataccagccagccaggagtgctgcagggtggtgctgtctacctctgtccttggggtgccagccccacacagtgcacccccattgaatttgacagcaaaggctctcggctcctggagtcctcactgtccagctcagagggagaggagcctgtggagtacaagtccttgcagtggttcggggcaacagttcgagcccatggctcctccatcttggcatgcgctccactgtacagctggcgcacagagaaggagccactgagcgaccccgtgggcacctgctacctctccacagataacttcacccgaattctggagtatgcaccctgccgctcagatttcagctgggcagcaggacagggttactgccaaggaggcttcagtgccgagttcaccaagactggccgtgtggttttaggtggaccaggaagctatttctggcaaggccagatcctgtctgccactcaggagcagattgcagaatcttattaccccgagtacctgatcaacctggttcaggggcagctgcagactcgccaggccagttccatctatgatgacagctacctaggatactctgtggctgttggtgaattcagtggtgatgacacagaagactttgttgctggtgtgcccaaagggaacctcacttacggctatgtcaccatccttaatggctcagacattcgatccctctacaacttctcaggggaacagatggcctcctactttggctatgcagtggccgccacagacgtcaatggggacgggctggatgacttgctggtgggggcacccctgctcatggatcggacccctgacgggcggcctcaggaggtgggcagggtctacgtctacctgcagcacccagccggcatagagcccacgcccacccttaccctcactggccatgatgagtttggccgatttggcagctccttgacccccctgggggacctggaccaggatggctacaatgatgtggccatcggggctccctttggtggggagacccagcagggagtagtgtttgtatttcctgggggcccaggagggctgggctctaagccttcccaggttctgcagcccctgtgggcagccagccacaccccagacttctttggctctgcccttcgaggaggccgagacctggatggcaatggatatcctgatctgattgtggggtcctttggtgtggacaaggctgtggtatacaggggccgccccatcgtgtccgctagtgcctccctcaccatcttccccgccatgttcaacccagaggagcggagctgcagcttagaggggaaccctgtggcctgcatcaaccttagcttctgcctcaatgcttctggaaaacacgttgctgactccattggtttcacagtggaacttcagctggactggcagaagcagaagggaggggtacggcgggcactgttcctggcctccaggcaggcaaccctgacccagaccctgctcatccagaatggggctcgagaggattgcagagagatgaagatctacctcaggaacgagtcagaatttcgagacaaactctcgccgattcacatcgctctcaacttctccttggacccccaagccccagtggacagccacggcctcaggccagccctacattatcagagcaagagccggatagaggacaaggctcagatcttgctggactgtggagaagacaacatctgtgtgcctgacctgcagctggaagtgtttggggagcagaaccatgtgtacctgggtgacaagaatgccctgaacctcactttccatgcccagaatgtgggtgagggtggcgcctatgaggctgagcttcgggtcaccgcccctccagaggctgagtactcaggactcgtcagacacccagggaacttctccagcctgagctgtgactactttgccgtgaaccagagccgcctgctggtgtgtgacctgggcaaccccatgaaggcaggagccagtctgtggggtggccttcggtttacagtccctcatctccgggacactaagaaaaccatccagtttgacttccagatcctcagcaagaatctcaacaactcgcaaagcgacgtggtttcctttcggctctccgtggaggctcaggcccaggtcaccctgaacggtgtctccaagcctgaggcagtgctattcccagtaagcgactggcatccccgagaccagcctcagaaggaggaggacctgggacctgctgtccaccatgtctatgagctcatcaaccaaggccccagctccattagccagggtgtgctggaactcagctgtccccaggctctggaaggtcagcagctcctatatgtgaccagagttacgggactcaactgcaccaccaatcaccccattaacccaaagggcctggagttggatcccgagggttccctgcaccaccagcaaaaacgggaagctccaagccgcagctctgcttcctcgggacctcagatcctgaaatgcccggaggctgagtgtttcaggctgcgctgtgagctcgggcccctgcaccaacaagagagccaaagtctgcagttgcatttccgagtctgggccaagactttcttgcagcgggagcaccagccatttagcctgcagtgtgaggctgtgtacaaagccctgaagatgccctaccgaatcctgcctcggcagctgccccaaaaagagcgtcaggtggccacagctgtgcaatggaccaaggcagaaggcagctatggcgtcccactgtggatcatcatcctagccatcctgtttggcctcctgctcctaggtctactcatctacatcctctacaagcttggattcttcaaacgctccctcccatatggcaccgccatggaaaaagctcagctcaagcctccagccacctctgatgcctgagtcctcccaatttcagactcccattcctgaagaaccagtccccccaccctcattctactgaaaaggaggggtctgggtacttcttgaaggtgctgacggccagggagaagctcctctccccagcccagagacatacttgaagggccagagccaggggggtgaggagctggggatccctcccccccatgcactgtgaaggacccttgtttacacataccctcttcatggatgggggaactcagatccagggacagaggcccagcctccctgaagcctttgcattttggagagtttcctgaaacaactggaaagataactaggaaatccattcacagttctttgggccagacatgccacaaggacttcctgtccagctccaacctgcaaagatctgtcctcagccttgccagagatccaaaagaagcccccagtaagaacctggaacttggggagttaagacctggcagctctggacagccccaccctggtgggccaacaaagaacactaactatgcatggtgccccaggaccagctcaggacagatgccacaaggatagatgctggcccagggccagagcccagctccaaggggaatcagaactcaaatggggccagatccagcctggggtctggagttgatctggaacccagactcagacattggcaccaatccaggcagatccaggactatatttgggcctgctccagacctgatcctggaggcccagttcaccctgatttaggagaagccaggaatttcccaggacctgaaggggccatgatggcaacagatctggaacctcagcctggccagacacaggccctccctgttccccagagaaaggggagcccactgtcctgggcctgcagaatttgggttctgcctgccagctgcactgatgctgcccctcatctctctgcccaacccttccctcaccttggcaccagacacccaggacttatttaaactctgttgcaagtgcaataaatctgacccagtgcccccactgaccagaactagaaaaaaaaa

SEQ ID NO: 271 - DNA, 4132 bp, Homo sapiens
cgctggggcccccggcgccgacccccgctgctgccgctgctgttgctgctgctgccgccgccacccagggtcgggggcttcaacttagacgcggaggccccagcagtactctcggggcccccgggctccttcttcggattctcagtggagttttaccggccgggaacagacggggtcagtgtgctggtgggagcacccaaggctaataccagccagccaggagtgctgcagggtggtgctgtctacctctgtccttggggtgccagccccacacagtgcacccccattgaatttgacagcaaaggctctcggctcctggagtcctcactgtccagctcagagggagaggagcctgtggagtacaagtccttgcagtggttcggggcaacagttcgagcccatggctcctccatcttggcatgcgctccactgtacagctggcgcacagagaaggagccactgagcgaccccgtgggcacctgctacctctccacagataacttcacccgaattctggagtatgcaccctgccgctcagatttcagctgggcagcaggacagggttactgccaaggaggcttcagtgccgagttcaccaagactggccgtgtggttttaggtggaccaggaagctatttctggcaaggccagatcctgtctgccactcaggagcagattgcagaatcttattaccccgagtacctgatcaacctggttcaggggcagctgcagactcgccaggccagttccatctatgatgacagctacctaggatactctgtggctgttggtgaattcagtggtgatgacacagaagactttgttgctggtgtgcccaaagggaacctcacttacggctatgtcaccatccttaatggctcagacattcgatccctctacaacttctcaggggaacagatggcctcctactttggctatgcagtggccgccacagacgtcaatggggacgggctggatgacttgctggtgggggcacccctgctcatggatcggacccctgacgggcggcctcaggaggtgggcagggtctacgtctacctgcagcacccagccggcatagagcccacgcccacccttaccctcactggccatgatgagtttggccgatttggcagctccttgacccccctgggggacctggaccaggatggctacaatgatgtggccatcggggctccctttggtggggagacccagcagggagtagtgtttgtatttcctgggggcccaggagggctgggctctaagccttcccaggttctgcagcccctgtgggcagccagccacaccccagacttctttggctctgcccttcgaggaggccgagacctggatggcaatggatatcctgatctgattgtggggtcctttggtgtggacaaggctgtggtatacaggggccgccccatcgtgtccgctagtgcctccctcaccatcttccccgccatgttcaacccagaggagcggagctgcagcttagaggggaaccctgtggcctgcatcaaccttagcttctgcctcaatgcttctggaaaacacgttgctgactccattggtttcacagtggaacttcagctggactggcagaagcagaagggaggggtacggcgggcactgttcctggcctccacgcaggcaaccctgacccagaccctgctcatccagaatggggctcgagaggattgcagagagatgaagatctacctcaggaacgagtcagaatttcgagacaaactctcgccgattcacatcgctctcaacttctccttggacccccaagccccagtggacagccacggcctcaggccagccctacattatcagagcaagagccggatagaggacaaggctcagatcttgctggactgtggagaagacaacatctgtgtgcctgacctgcagctggaagtgtttggggagcagaaccatgtgtacctgggtgacaagaatgccctgaacctcactttccatgcccagaatgtgggtgagggtggcgcctatgaggctgagcttcgggtcaccgcccctccagaggctgagtactcaggactcgtcagacacccagggaacttctccagcctgagctgtgactactttgccgtgaaccagagccgcctgctggtgtgtgacctgggcaaccccatgaaggcaggagccagtctgtggggtggccttcggtttacagtccctcatctccgggacactaagaaaaccatccagtttgacttccagatcctcagcaagaatctcaacaactcgcaaagcgacgtggtttcctttcggctctccgtggaggctcaggcccaggtcaccctgaacggtgtctccaagcctgaggcagtgctattcccagtaagcgactggcatccccgagaccagcctcagaaggaggaggacctgggacctgctgtccaccatgtctatgagctcatcaaccaaggccccagctccattagccagggtgtgctggaactcagctgtccccaggctctggaaggtcagcagctcctatatgtgaccagagttacgggactcaactgcaccaccaatcaccccattaacccaaagggcctggagttggatcccgagggttccctgcaccaccagcaaaaacgggaagctccaagccgcagctctgcttcctcgggacctcagatcctgaaatgcccggaggctgagtgtttcaggctgcgctgtgagctcgggcccctgcaccaacaagagagccaaagtctgcagttgcatttccgagtctgggccaagactttcttgcagcgggagcaccagccatttagcctgcagtgtgaggctgtgtacaaagccctgaagatgccctaccgaatcctgcctcggcagctgccccaaaaagagcgtcaggtggccacagctgtgcaatggaccaaggcagaaggcagctatggcgtcccactgtggatcatcatcctagccatcctgtttggcctcctgctcctaggtctactcatctacatcctctacaagcttggattcttcaaacgctccctcccatatggcaccgccatggaaaaagctcagctcaagcctccagccacctctgatgcctgagtcctcccaatttcagactcccattcctgaagaaccagtccccccaccctcattctactgaaaaggaggggtctgggtacttcttgaaggtgctgacggccagggagaagctcctctccccagcccagagacatacttgaagggccagagccaggggggtgaggagctggggatccctcccccccatgcactgtgaaggacccttgtttacacataccctcttcatggatgggggaactcagatccagggacagaggcccagcctccctgaagcctttgcattttggagagtttcctgaaacaacttggaaagataactaggaaatccattcacagttctttgggccagacatgccacaaggacttcctgtccagctccaacctgcaaagatctgtcctcagccttgccagagatccaaaagaagcccccagctaagaacctggaacttggggagttaagacctggcagctctggacagccccaccctggtgggccaacaaagaacactaactatgcatggtgccccaggaccagctcaggacagatgccacacaaggatagatgctggcccagggccagagcccagctccaaggggaatcagaactcaaatggggccagatccagcctggggtctggagttgatctggaacccagactcagacattggcacctaatccaggcagatccaggactatatttgggcctgctccagacctgatcctggaggcccagttcaccctgatttaggagaagccaggaatttcccaggacctgaaggggccatgatggcaacagatctggaacctcagcctggccagacacaggccctccctgttccccagagaaaggggagcccactgtcctgggcctgcagaatttcccttctgcctgccagctgcactgatgctgcccctcatctctctgcccaacccttccctcaccttggcaccagacacccaggacttatttaaactctgttgcaagtgcaataaatctgacccagtgcccccactgaccagaactag

SEQ ID NO: 272 - DNA, 4252 bp, Homo sapiens
ggcacgagggtttaggaagcggctccgggtcggtggccccaggacagggaagagcgggcgctatggggagccggacgccagagtcccctctccacgccgtgcagctgcgctggggcccccggcgccgacccccgctgctgccgctgctgttgctgctgctgccgccgccacccagggtcgggggcttcaacttagacgcggaggccccagcagtactctcggggcccccgggctccttcttcggattctcagtggagttttaccggccgggaacagacggggtcagtgtgctggtgggagcacccaaggctaataccagccagccaggagtgctgcagggtggtgctgtctacctctgtccttggggtgccagccccacacagtgcacccccattgaatttgacagcaaaggctctcggctcctggagtcctcactgtccagctcagagggagaggagcctgtggagtacaagtccttgcagtggttcggggcaacagttcgagcccatggctcctccatcttggcatgcgctccactgtacagctggcgcacagagaaggagccactgagcgaccccgtgggcacctgctacctctccacagataacttcacccgaattctggagtatgcaccctgccgctcagatttcagctgggcagcaggacagggttactgccaaggaggcttcagtgccgagttcaccaagactggccgtgtggttttaggtggaccaggaagctatttctggcaaggccagatcctgtctgccactcaggagcagattgcagaatcttattaccccgagtacctgatcaacctggttcaggggcagctgcagactcgccaggccagttccatctatgatgacagctacctaggatactctgtggctgttggtgaattcagtggtgatgacacagaagactttgttgctggtgtgcccaaagggaacctcacttacggctatgtcaccatccttaatggctcagacattcgatccctctacaacttctcaggggaacagatggcctcctactttggctatgcagtggccgccacagacgtcaatggggacgggctggatgacttgctggtgggggcacccctgctcatggatcggacccctgacgggcggcctcaggaggtgggcagggtctacgtctacctgcagcacccagccggcatagagcccacgcccacccttaccctcactggccatgatgagtttggccgatttggcagctccttgacccccctgggggacctggaccaggatggctacaatgatgtggccatcggggctccctttggtggggagacccagcagggagtagtgtttgtatttcctgggggcccaggagggctgggctctaagccttcccaggttctgcagcccctgtgggcagccagccacaccccagacttctttggctctgcccttcgaggaggccgagacctggatggcaatggatatcctgatctgattgtggggtcctttggtgtggacaaggctgtggtatacaggggccgccccatcgtgtccgctagtgcctccctcaccatcttccccgccatgttcaacccagaggagcggagctgcagcttagaggggaaccctgtggcctgcatcaaccttagcttctgcctcaatgcttctggaaaacacgttgctgactccattggtttcacagtggaacttcagctggactggcagaagcagaagggaggggtacggcgggcactgttcctggcctccaggcaggcaaccctgacccagaccctgctcatccagaatggggctcgagaggattgcagagagatgaagatctacctcaggaacgagtcagaatttcgagacaaactctcgccgattcacatcgctctcaacttctccttggacccccaagccccagtggacagccacggcctcaggccagccctacattatcagagcaagagccggatagaggacaaggctcagatcttgctggactgtggagaagacaacatctgtgtgcctgacctgcagctggaagtgtttggggagcagaaccatgtgtacctgggtgacaagaatgccctgaacctcactttccatgcccagaatgtgggtgagggtggcgcctatgaggctgagcttcgggtcaccgcccctccagaggctgagtactcaggactcgtcagacacccagggaacttctccagcctgagctgtgactactttgccgtgaaccagagccgcctgctggtgtgtgacctgggcaaccccatgaaggcaggagccagtctgtggggtggccttcggtttacagtccctcatctccgggacactaagaaaaccatccagtttgacttccagatcctcagcaagaatctcaacaactcgcaaagcgacgtggtttcctttcggctctccgtggaggctcaggcccaggtcaccctgaacggtgtctccaagcctgaggcagtgctattcccagtaagcgactggcatccccgagaccagcctcagaaggaggaggacctgggacctgctgtccaccatgtctatgagctcatcaaccaaggccccagctccattagccagggtgtgctggaactcagctgtccccaggctctggaaggtcagcagctcctatatgtgaccagagttacgggactcaactgcaccaccaatcaccccattaacccaaagggcctggagttggatcccgagggttccctgcaccaccagcaaaaacgggaagctccaagccgcagctctgcttcctcgggacctcagatcctgaaatgcccggaggctgagtgtttcaggctgcgctgtgagctcgggcccctgcaccaacaagagagccaaagtctgcagttgcatttccgagtctgggccaagactttcttgcagcgggagcaccagccatttagcctgcagtgtgaggctgtgtacaaagccctgaagatgccctaccgaatcctgcctcggcagctgccccaaaaagagcgtcaggtggccacagctgtgcaatggaccaaggcagaaggcagctatggcgtcccactgtggatcatcatcctagccatcctgtttggcctcctgctcctaggtctactcatctacatcctctacaagcttggattcttcaaacgctccctcccatatggcaccgccatggaaaaagctcagctcaagcctccagccacctctgatgcctgagtcctcccaatttcagactcccattcctgaagaaccagtccccccaccctcattctactgaaaaggaggggtctgggtacttcttgaaggtgctgacggccagggagaagctcctctccccagcccagagacatacttgaagggccagagccaggggggtgaggagctggggatccctcccccccatgcactgtgaaggacccttgtttacacataccctcttcatggatgggggaactcagatccagggacagaggccccagcctccctgaagcctttgcattttggagagtttcctgaaacaacttggaaagataactaggaaatccattcacagttctttgggccagacatgccacaaggacttcctgtccagctccaacctgcaaagatctgtcctcagccttgccagagatccaaaagaagcccccagctaagaacctggaacttggggagttaagacctggcagctctggacagccccaccctggtgggccaacaaagaacactaactatgcatggtgccccaggaccagctcaggacagatgccacacaaggatagatgctggcccagggcccagagcccagctccaaggggaatcagaactcaaatggggccagatccagcctggggtctggagttgatctggaacccagactcagacattggcacctaatccaggcagatccaggactatatttgggcctgctccagacctgatcctggaggcccagttcaccctgatttaggagaagccaggaatttcccaggaccctgaaggggccatgatggcaacagatctggaacctcagcctggccagacacaggccctccctgttccccagagaaaggggagcccactgtcctgggcctgcagaatttgggttctgcctgccagctgcactgatgctgcccctcatctctctgcccaacccttccctcaccttggcaccagacacccaggacttatttaaactctgttgcaagtgcaataaatctgacccagtgcccccactgaccaaaaaaaaaaaaaaaaaa

SEQ ID NO: 273 - DNA, 4204 bp, Homo sapiens; identical to SEQ ID NO: 270

SEQ ID NO: 274 - DNA, 2113 bp, Homo sapiens
ggagttgagaattagggaggaggtggtagagtccgggtagtgagcggagggacaggaagggtagggcaagaaagggagaggggacaggagggaagggtgggccaaagcggtgagaaaggagggccagccagttgggtgggggagagggccgaggcccgggggcaggagtgcagggctctgaggcggggagaggagaggagagaagagccgcggggggcccagcccggagccaggatgcccgcgccgcgcgcccgggagcagccccgcgtgcccggggagcgccagccgctgctgcctcgcggtgcgcggggccctcgacggtggcggcgggcggcgggcgcggccgtgctgctggtggagatgctggagcgcgccgccttcttcggcgtcaccgccaacctcgtgctgtacctcaacagcaccaacttcaactggaccggcgagcaggcgacgcgcgccgcgctggtattcctgggcgcctcctacctgctggcgcccgtgggcggctggctggccgacgtgtacctgggccgctaccgcgcggtcgcgctcagcctgctgctctacctggccgcctcgggcctgctgcccgccaccgccttccccgacggccgcagctccttctgcggagagatgcccgcgtcgccgctgggacctgcctgcccctcggccggctgcccgcgctcctcgcccagcccctactgcgcgcccgtcctctacgcgggcctgctgctactcggcctggccgccagctccgtccggagcaacctcacctccttcggtgccgaccaggtgatggatctcggccgcgacgccacccgccgcttcttcaactggttttactggagcatcaacctgggtgctgtgctgtcgctgctggtggtggcgtttattcagcagaacatcagcttcctgctgggctacagcatccctgtgggctgtgtgggcctggcatttttcatcttcctctttgccacccccgtcttcatcaccaagcccccgatgggcagccaagtgtcctctatgcttaagctcgctctccaaaactgctgcccccagctgtggcaacgacactcggccagagaccgtcaatgtgcccgcgtgctggccgacgagaggtctccccagccaggggcttccccgcaagaggacatcgccaacttccaggtgctggtgaagatcttgcccgtcatggtgaccctggtgccctactggatggtctacttccagatgcagtccacctatgtcctgcagggtcttcacctccacatcccaaacattttcccagccaacccggccaacatctctgtggccctgagagcccagggcagcagctacacgatcccggaagcctggctcctcctggccaatgttgtggtggtgctgattctggtccctctgaaggaccgcttgatcgaccctttactgctgcggtgcaagctgcttccctctgctctgcagaagatggcgctggggatgttctttggttttacctccgtcattgtggcaggagtcctggagatggagcgcttacactacatccaccacaacgagaccgtgtcccagcagattggggaggtcctgtacaacgcggcaccactgtccatctggtggcagatccctcagtacctgctcattgggatcagtgagatctttgccagcatcccaggcctggagtttgcctactcagaggccccgcgctccatgcagggcgccatcatgggcatcttcttctgcctgtcgggggtgggctcactgttgggctccagcctagtggcactgctgtccttgcccgggggctggctgcactgccccaaggactttgggaacatcaacaattgccggatggacctctacttcttcctgctggctggcattcaggccgtcacggctctcctatttgtctggatcgctggacgctatgagagggcgtcccagggcccagcctcccacagccgtttcagcagggacaggggctgaacaggccctattccagcccccttgcttcactctaccggacagacggcagcagtcccagctctggtttccttctcggtttattctgttagaatgaaatggttcccataaataaggggcatgagcccttcctccc

SEQ ID NO: 275 - DNA, 2113 bp, Homo sapiens; identical to SEQ ID NO: 274

SEQ ID NO: 276 - DNA, 1874 bp, Homo sapiens
gggagagggccgaggcccgggggcaggagtgcagggctctgaggcggggagaggagaggagagaagagccgcggggggcccagcccggagccaggatgcccgcgccgcgcgcccgggagcagccccgcgtgcccggggagcgccagccgctgctgcctcgcggtgcgcggggccctcgacggtggcggcgggcggcgggcgcggccgtgctgctggtggagatgctggagcgcgccgccttcttcggcgtcaccgccaacctcgtgctgtacctcaacagcaccaacttcaactggaccggcgagcaggcgacgcgcgccgcgctggtattcctgggcgcctcctacctgctggcgcccgtgggcggctggctggccgacgtgtacctgggccgctaccgcgcggtcgcgctcagcctgctgctctacctggccgcctcgggcctgctgcccgccaccgccttccccgacggccgcagctccttctgcggagagatgcccgcgtcgccgctgggacctgcctgcccctcggccggctgcccgcgctcctcgcccagcccctactgcgcgcccgtcctctacgcgggcctgctgctactcggcctggccgccagctccgtccggagcaacctcacctccttcggtgccgaccaggtgatggatctcggccgcgacgccacccgccgcttcttcaactggtttactggagcatcaacctgggtgctgtgctgtcgctgctggtggtggcgtttattcagcagaacatcagcttcctgctgggctacagcatccctgtgggctgtgtgggcctggcatttttcatcttcctctttgccacccccgtcttcatcaccaagcccccgatgggcagccaagtgtcctctatgcttaagctcgctctccaaaactgctgcccccagctgtggcaacgacactcggccagagaccgtcaatgtgcccgcgtgctggccgacgagaggtctccccagccaggggcttccccgcaagaggacatcgccaacttccaggtgctggtgaagatcttgcccgtcatggtgaccctggtgccctactggatggtctacttccagatgcagtccacctatgtcctgcagggtcttcacctccacatcccaaacattttcccagccaacccggccaacatctctgtggccctgagagcccagggcagcagctacacggagtcctggagatggagcgcttacactacatccaccacaacgagaccgtgtcccagcagattggggaggtcctgtacaacgcggcaccactgtccatctggtggcagatccctcagtacctgctcattgggatcagtgagatctttgccagcatcccaggcctggagtttgcctactcagaggccccgcgctccatgcagggcgccatcatgggcatcttcttctgcctgtcgggggtgggctcactgttgggctccagcctagtggcactgctgtccttgcccgggggctggctgcactgccccaaggactttgggaacatcaacaattgccggatggacctctacttcttcctgctggctggcattcaggccgtcacggctctcctatttgtctggatcgctggacgctatgagagggcgtcccagggcccagcctcccacagccgtttcagcagggacaggggctgaacaggccctattccagcccccttgcttcactctaccggacagacggcagcagtcccagctctggtttccttctcggtttattctgttagaatgaaatggttcccataaataaggggcatgagcccttcctcacgaaaaaaaaaaaaaaaaaaaaaaaaaaaaaaaaaaaaaaaaaaaaaaaaaaaaaaaaaaaaaaaaaaaaa

SEQ ID NO: 277 - DNA, 2034 bp, Homo sapiens
ggagagggccgaggcccgggggcaggagtgcagggctctgaggcggggagaggagaggagagaagagccgcggggggcccagcccggagccaggatgcccgcgccgcgcgcccgggagcagccccgcgtgcccggggagcgccagccgctgctgcctcgcggtgcgcggggccctcgacggtggcggcgggcggcgggcgcggccgtgctgctggtggagatgctggagcgcgccgccttcttcggcgtcaccgccaacctcgtgctgtacctcaacagcaccaacttcaactggaccggcgagcaggcgacgcgcgccgcgctggtattcctgggcgcctcctacctgctggcgcccgtgggcggctggctggccgacgtgtacctgggccgctaccgcgcggtcgcgctcagcctgctgctctacctggccgcctcgggcctgctgcccgccaccgccttccccgacggccgcagctccttctgcggagagatgcccgcgtcgccgctgggacctgcctgcccctcggccggctgcccgcgctcctcgcccagcccctactgcgcgcccgtcctctacgcgggcctgctgctactcggcctggccgccagctccgtccggagcaacctcacctccttcggtgccgaccaggtgatggatctcggccgcgacgccacccgccgcttcttcaactggttttactggagcatcaacctgggtgctgtgctgtcgctgctggtggtggcgtttattcagcagaacatcagcttcctgctgggctacagcatccctgtgggctgtgtgggcctggcatttttcatcttcctctttgccacccccgtcttcatcaccaagcccccgatgggcagccaagtgtcctctatgcttaagctcgctctccaaaactgctgcccccagctgtggcaacgacactcggccagagaccgtcaatgtgcccgcgtgctggccgacgagaggtctccccagccaggggcttccccgcaagaggacatcgccaacttccaggtgctggtgaagatcttgcccgtcatggtgaccctggtgccctactggatggtctacttccagatgcagtccacctatgtcctgcagggtcttcacctccacatcccaaactttttcccagccaacccggccaacatctctgtggccctgagagcccagggcagcagctacacgatcccggaagcctggctcctcctggccaatgttgtggtggtgctgattctggtccctctgaaggaccgcttgatcgaccctttactgctgcggtgcaagctgcttccctctgctctgcagaagatggcgctggggatgttctttggttttacctccgtcattgtggcaggagtcctggagatggagcgcttacactacatccaccacaacgagaccgtgtcccagcagattggggaggtcctgtacaacgcggcaccactgtccatctggtggcagatccctcagtacctgctcattgggatcagtgagatctttgccagcatcccaggcctggagtttgcctactcagaggccccgcgctccatgcagggcgccatcatgggcatcttcttctgcctgtcgggggtgggctcactgttgggctccagcctagtggcactgctgtccttgcccgggggctggctgcactgccccaaggactttgggaacatcaacaattgccggatggacctctacttcttcctgctggctggcattcaggccgtcacggctctcctatttgtctggatcgctggacgctatgagagggcgtcccagggcccagcctcccacagccgtttcagcagggacaggggctgaacaggccctattccagcccccttgcttcactctaccggacagacggcagcagtcccagctctggtttccttctcggtttattctgttagaatgaaatggttcccataaataaggggcatgagcccttcctcacgaaaaaaaaaaaaaaaaaaaaaaaaaaaaaaaaaaaaaaaaaaaaaaaaaaaaaaaaaaaa

SEQ ID NO: 278 - DNA, 2643 bp, Homo sapiens
gctactcccacctgccacgccgcaagagaatgtctgtggcccacatgagcttgcaagctgccgctgccctcctcaaggggcgctcggtgctggatgccaccggacagcggtgccgggtggtcaagcgcagctttgccttcccgagcttcctggaggaggatgtggtcgatggggcagacacgtttgactcctccttttttagtaaggaagaaatgagctccatgcctgatgatgtctttgagtcccccccactctctgccagctacttccgagggatcccacactcagcctcccctgtctcccccgatggggtgcaaatccctctgaaggagtatggccgagccccagtccccgggccccggcgcggcaagcgcatcgcctccaaggtgaagcactttgcctttgatcggaagaagcggcactacggcctcggcgtggtgggcaactggctgaaccgcagctaccgccgcagcatcagcagcactgtgcagcggcagctggagagcttcgacagccaccggccctacttcacctactggctgaccttcgtccatgtcatcatcacgctgctggtgatttgcacgtatggcatcgcacccgtgggctttgcccagcacgtcaccacccagctggtgctgcggaacaaaggtgtgtacgagagcgtgaagtacatccagcaggagaacttctgggttggccccagctcgattgacctgatccacctgggggccaagttctcaccctgcatccggaaggacgggcagatcgagcagctggtgctgcgcgagcgagacctggagcgggactcaggctgctgtgtccagaatgaccactccggatgcatccagacccagcggaaggactgctcggagactttggccacttttgtcaagtggcaggatgacactgggccccccatggacaagtctgatctgggccagaagcggacttcgggggctgtctgccaccaggaccccaggacctgcgaggagccagcctccagcggtgcccacatctggcccgatgacatcactaagtggccgatctgcacagagcaggccaggagcaaccacacaggcttcctgcacatggactgcgagatcaagggccgcccctgctgcatcggcaccaagggcagctgtgagatcaccacccgggaatactgtgagttcatgcacggctatttccatgaggaagcaacactctgctcccaggtgcactgcttggacaaggtgtgtgggctgctgcccttcctcaaccctgaggtcccagatcagttctacaggctctggctgtctctcttcctacatgctggcgtggtgcactgcctcgtgtctgtggtctttcaaatgaccatcctgagggacctggagaagctggccggctggcaccgtatcgccatcatcttcatcctcagtggcatcacaggcaacctcgccagtgccatctttctcccataccgggcagaggtgggcccggccggctcacagttcggcctcctcgcctgcctcttcgtggagctcttccagagctggccgctgctggagaggccctggaaggccttcctcaacctctcggccatcgtgctcttcctgttcatctgtggcctcttgccctggatcgacaacatcgcccacatcttcggcttcctcagtggcctgctgctggccttcgccttcctgccctacatcaccttcggcaccagcgacaagtaccgcaagcgggcactcatcctggtgtcactgctggcctttgccggcctcttcgccgccctcgtgctgtggctgtacatctaccccattaactggccctggatcgagcacctcacctgcttccccttcaccagccgcttctgcgagaagtatgagctggaccaggtgctgcactgaccgctgggccacacggctgcccctcagccctgctggaacagggtctgcctgcgagggctgccctctgcagagcgctctctgtgtgccagagagccagagacccaagacagggcccgggctctggacctgggtgcccccctgccaggcgaggctgactccgcgtgagatggttggttaaggcggggtttttctggggcgtgaggcctgtgagatcctgacccaagctcaggcacacccaaggcacctgcctctctgagtcttgggtctcagttcctaatatcccgctccttgctgagaccatctcctggggcagggtccttttcttcccaggtcctcagcgctgcctctgctggtgccttctcccccactactactggagcgtgcccttgctggggacgtggctgtgccctcagttgcccccagggctgggtgcccaccatgccccttcctctttctcctcctacctctgccctgtgagcccatccataaggctctcagatgggacattgtaggaaaggctttggccatggtctgggggcagagaacaaggggggagacacaagtagacctcaggtagaacgacaccgggcggagccaccccagggcctgctcccagggagtgctcgaggcgcatcaggcccgttttttaccagtttatatcacggtcttcatttttaaaagtaacgctaactttgtacggacgatgtctcatggattaaataatattctttatggcaaaaaaaaaaaaaaaaaa

SEQ ID NO: 279 - DNA, 3596 bp, Homo sapiens
gccgctcgcaggcgccgcacggagttgcgtcccggggacttggggccgcagggagctgtgagtacccaggaagctgcaccgtgtggcctggagctgtctatctgtccttccagccacctgtctgtccagccacccttccacagactgaggcttgacaccggagcatctgtacagagcaaggagaagacaagaacatgctctaaagcccttcacagcaagacccaggaagccgcgggcaaactcagactcgaagccctcccgcctcctgcccacaatggcctctgctgacaagaatggcgggagcgtgtcctctgtgtccagcagccgcctgcagagccggaagccacccaacctctccatcaccatcccgccacccgagaaagagacccaggcccctggcgagcaggacagcatgctgcctgagggttttcagaataggaggctaaagaaaagccagcccaggacctgggcttcacacaccaccgcctgccctccctccttcctccccaagaggaagaacccagcctacttgaagagcgtcagcctccaggagccacgcagccgatggcaggagagttcagagaagcgccctggcttccgccgccaggcctcactgtcccagagcatccgcaagggcgcagcccagtggtttggagtcagcggcgactgggaggggcagcggcagcagtggcagcgccgcagcctgcaccactgcagcatgcgctacggccgcctgaaggcctcgtgccagcgtgacctggagctccccagccaggaggcaccgtccttccagggcactgagtccccaaagccctgcaagatgcccaagattgtggatccgctggcccggggccgggccttccgccacccggaggagatggacaggccccacgccctgcacccaccgctgacccccggagtcctgtccctcacctccttcaccagtgtccgttctggctactcccacctgccacgccgcaagagaatgtctgtggcccacatgagcttgcaagctgccgctgccctcctcaaggggcgctcggtgctggatgccaccggacagcggtgccgggtggtcaagcgcagctttgccttcccgagcttcctggaggaggatgtggtcgatggggcagacacgtttgactcctccttttttagtaaggaagaaatgagctccatgcctgatgatgtctttgagtcccccccactctctgccagctacttccgagggatcccacactcagcctcccctgtctcccccgatggggtgcaaatccctctgaaggagtatggccgagccccagtccccgggccccggcgcggcaagcgcatcgcctccaaggtgaagcactttgcctttgatcggaagaagcggcactacggcctcggcgtggtgggcaactggctgaaccgcagctaccgccgcagcatcagcagcactgtgcagcggcagctggagagcttcgacagccaccggccctacttcacctactggctgaccttcgtccatgtcatcatcacgctgctggtgatttgcacgtatggcatcgcacccgtgggctttgcccagcacgtcaccacccagctggtgctgcggaacaaaggtgtgtacgagagcgtgaagtacatccagcaggagaacttctgggttggccccagctcgattgacctgatccacctgggggccaagttctcaccctgcatccggaaggacgggcagatcgagcagctggtgctgcgcgagcgagacctggagcgggactcaggctgctgtgtccagaatgaccactccggatgcatccagacccagcggaaggactgctcggagactttggccacttttgtcaagtggcaggatgacactgggccccccatggacaagtctgatctgggccagaagcggacttcgggggctgtctgccaccaggaccccaggacctgcgaggagccagcctccagcggtgcccacatctggcccgatgacatcactaagtggccgatctgcacagagcaggccaggagcaaccacacaggcttcctgcacatggactgcgagatcaagggccgcccctgctgcatcggcaccaagggcagctgtgagatcaccacccgggaatactgtgagttcatgcacggctatttccatgaggaagcaacactctgctcccaggtgcactgcttggacaaggtgtgtgggctgctgcccttcctcaaccctgaggtcccagatcagttctacaggctctggctgtctctcttcctacatgctggcgtggtgcactgcctcgtgtctgtggtctttcaaatgaccatcctgagggacctggagaagctggccggctggcaccgtatcgccatcatcttcatcctcagtggcatcacaggcaacctcgccagtgccatctttctcccataccgggcagaggtgggcccggccggctcacagttcggcctcctcgcctgcctcttcgtggagctcttccagagctggccgctgctggagaggccctggaaggccttcctcaacctctcggccatcgtgctcttcctgttcatctgtggcctcctgccctggatcgacaacatcgcccacatcttcggcttcctcagtggcctgctgctggccttcgccttcctgccctacatcaccttcggcaccagcgacaagtaccgcaagcgggcactcatcctggtgtcactgctggcctttgccggcctcttcgccgccctcgtgctgtggctgtacatctaccccattaactggccctggatcgagcacctcacctgcttccccttcaccagccgcttctgcgagaagtatgagctggaccaggtgctgcactgaccgctgggccacacggctgcccctcagccctgctggaacagggtctgcctgcgagggctgccctctgcagagcgctctctgtgtgccagagagccagagacccaagacagggcccgggctctggacctgggtgcccccctgccaggcgaggctgactccgcgtgagatggttggttaaggcggggtttttctggggcgtgaggcctgtgagatcctgacccaagctcaggcacacccaaggcacctgcctctctgagtcttgggtctcagttcctaatatcccgctccttgctgagaccatctcctggggcagggtccttttcttcccaggtcctcagcgctgcctctgctggtgccttctcccccactactactggagcgtgcccttgctggggacgtggctgtgccctcagttgcccccagggctgggtgcccaccatgccccttcctctttctcctcctacctctgccctgtgagcccatccataaggctctcagatgggacattgtgggaaaggctttggccatggtctgggggcagagaacaaggggggagacacaagtagacctcaggtagaacgacactgggcggagccaccccagggcctgctcccagggagtgctcgaggcgcatcaggcccgttttttaccagtttatatcacggtcttcatttttaaaagtaacgctaactttgtagggacgatgtctcatggattaaataatattctttatggcaaaaaaaaaaaaaaa

SEQ ID NO: 280 - DNA, 2097 bp, Homo sapiens
acaatggcctctgctgacaagaatggcgggagcgtgtcctctgtgtccagcagccgcctgcagagccggaagccacccaacctctccatcaccatcccgccacccgagaaagagacccaggcccctggcgagcaggacagcatgctgcctgagaggaagaacccagcctacttgaagagcgtcagcctccaggagccacgcagccgatggcaggagagttcagagaagcgccctggcttccgccgccaggcctcactgtcccagagcatccgcaagggcgcagcccagtggtttggagtcagcggcgactgggaggggcagcggcagcagtggcagcgccgcagcctgcaccactgcagcatgcgctacggccgcctgaaggcctcgtgccagcgtgacctggagctccccagccaggaggcaccgcccttccagggcactgagtccccaaagccctgcaagatgcccaaggtgggatccatggggaaaggaggcaggggtggggaccctaatggctctgcttaccgcccccctcccttccagattgtggatccgctggcccggggccgggccttccgccacccggaggagatggacaggccccacgccccgcacccaccgctgacccccggagtcctgtccctcacctccttcaccagtgtccgttctggctactcccacctgccacgccgcaagagaatgtctgtggcccacatgagcttgcaagctgccgctgccctcctcaaggggcgctcggtgctggatgccaccggacagcggtgccgggtggtcaagcgcagctttgccttcccgagcttcctggaggaggatgtggtcgatggggcagacacgtttgactcctccttttttagtaaggaagaaatgagctccatgcctgatgatgtctttgagtcccccccactctctgccagctacttccgagggatcccacactcagcctcccctgtctcccccgatggggtgcaaatccctctgaaggagtatggccgagccccagtccccgggccccggcgcggcaagcgcatcgcctccaaggtgaagcactttgcctttgatcggaagaagcggcactacggcctcggtgtggtgggcaactggctgaaccgcagctaccgccgcagcatcagcagcactgtgcagcggcagctggagagcttcgacagccaccggtgaggtgtcgccctggagcccccaggagagcctggaaggttccaaattcctctgggccctcctgaagcgcccccttactcattcagcaagtgtttcatgagcatcttctgcggatcaggagtgtagtgacaagctcgaaggcgcaccctgtcccaagggttgtgcacatgacctgggaagggccaggggtgcttgctgcctctcttccaccccatgctttctgagcctggtccccagccttgctcccagacagcagtcagtcaacaaatgttcattgagtgtcactgcctgcaggccctaaaatggaacccccagagggtggagcagggagggcagggtcggtcagaggacagttagaagctggggccagggctgggcgccgtggctcacacttgtaattatagcactttgggaggctgagtcagaaggattgcttgagcctaggagtttgagaccagcctgggcaacatagtgagaccctacctctactttaaaagaagaagctggggctgggagggaggggactctgggagaggctatgcagagcccttggggaagaacagggcatctgatttgcagcagcccaataaacactgggcccaaattagaaaataacaagcaggcagggcgcggtggctcacgcctgtaattccagcactttctgaggccgaggcaggcggatcacctgaggtcaggagttcaagaccagcctggccaacatggtgaaaccccatctctactaaaaatacaaaaaattagccgggcgtggtggtgcgtgcctgtaatcccagctactcgggaggcttgaggcaggagaatcacttgaacctgggaggcagaggttgcagtgagccaggatcgcaccattgtactccagcctgggcaacaagagcgaaattccatctc

SEQ ID NO: 281 - DNA, 3596 bp, Homo sapiens; identical to SEQ ID NO: 279

SEQ ID NO: 282 - DNA, 4539 bp, Homo sapiens
gaaatctttgcattcatcaaaaaagacaagaggcctagggccgggtgtgctgggattacaggcgtgagccaccgcgcccagccgcccagagatgtttgaaccaactttaggcaagttggttcttggtctgggctgcgtgccctggcgtcagggtcctgacactgcgccaccccgcaccgcccaccgctgctctcccggtctccattccagccctcccgcctcctgcccacaatggcctctgctgacaagaatggcgggcgcgtgtcctctgtgtccagcagccgcctgcagagccggaagccacccaacctctccatcaccatcccgccacccgagaaagagacccaggcccctggcgagcaggacagcatgctgcctgagaggaagaacccagcctacttgaagagcgtcagcctccaggagccacgcagccgatggcaggagagttcagagaagcgccctggcttccgccgccaggcctcactgtcccagagcatccgcaagtgagcccccctacacccaagcccagcaccccccacccagcaacctgtggattctcggggcctggacatgattgggcctggtccctgcgtcccctctctggaaggaggaggccggcattaatgagcaatgtctccctgtggcctattatcatggtatagatggggaaatgggtatgtgctttgcggaatatcacggtgtggaggctggggggcttcgaggagctgggtggatcagtgtgggggtgcctggggccctagcctggctcctcacgctcccgtcatcccctgcttctgctcatctggtcactgggctccagccaggggcctcacaggcagatccgccccccacctccctgtaggcacgcgggcacacacgtgccatcaccccttccacacactcaggtgcacaggcgtagacaagcgtatgcccacctgtcccttgtctgcttccgcaggggcgcagcccagtggtttggagtcagcggcgactgggaggggcagcggcagcagtggcagcgccgcagcctgcaccactgcagcatgcgctacggccgcctgaaggcctcgtgccagcgtgacctggagctccccagccaggaggcaccgtccttccagggcactgagtccccaaagccctgcaagatgcccaagattgtggatccgctggcccggggccgggccttccgccacccggaggagatggacaggccccacgccctgcacccaccgctgacccccggagtcctgtccctcacctccttcaccagtgtccgttctggctactcccacctgccacgccgcaagagaatgtctgtggcccacatgagcttgcaagctgccgctgccctcctcaaggggcgctcggtgctggatgccaccggacagcggtgccgggtggtcaagcgcagctttgccttcccgagcttcctggaggaggatgtggtcgatggggcagacacgtttgactcctccttttttagtaaggaagaaatgagctccatgcctgatgatgtctttgagtcccccccactctctgccagctacttccgagggatcccacactcagcctcccctgtctcccccgatggggtgcaaatccctctgaaggagtatggccgagccccagtccccgggccccggcgcggcaagcgcatcgcctccaaggtgaagcactttgcctttgatcggaagaagcggcactacggcctcggcgtggtgggcaactggctgaaccgcagctaccgccgcagcatcagcagcactgtgcagcggcagctggagagcttcgacagccaccggccctacttcacctactggctgaccttcgtccatgtcatcatcacgctgctggtgatttgcacgtatggcatcgcacccgtgggctttgcccagcacgtcaccacccagctggtgctgcggaacaaaggtgtgtacgagagcgtgaagtacatccagcaggagaacttctgggttggccccagctcgattgacctgatccacctgggggccaagttctcaccctgcatccggaaggacgggcagatcgagcagctggtgctgcgcgagcgagacctggagcgggactcaggctgctgtgtccagaatgaccactccggatgcatccagacccagcggaaggactgctcggagactttggccacttttgtcaagtggcaggatgacactgggccccccatggacaagtctgatctgggccagaagcggacttcgggggctgtctgccaccaggaccccaggacctgcgaggagccagcctccagcggtgcccacatctggcccgatgacatcactaagtggccgatctgcacagagcaggccaggagcaaccacacaggcttcctgcacatggactgcgagatcaagggccgcccctgctgcatcggcaccaagggcagctgtgagatcaccacccgggaatactgtgagttcatgcacggctatttccatgaggaagcaacactctgctcccaggtgcactgcttggacaaggtgtgtgggctgctgcccttcctcaaccctgaggtcccagatcagttctacaggctctggctgtctctcttcctacatgctggcgtggtgcactgcctcgtgtctgtggtctttcaaatgaccatcctgagggacctggagaagctggccggctggcaccgtatcgccatcatcttcatcctcagtggcatcacaggcaacctcgccagtgccatctttctcccataccgggcagaggtaaggatgtggaggatgggaccccttccgcacatagggggccagccctgctgctcctattccacccacctgggatctgccagagggacacggtgcccctcctgtactgggctccacagcggagggacagctaatctgggggcttactggctggtctcttaatcccagtgagagggaacagtgatgctcttgagtcaccctgtccctccaccgccccatttatcttcctaaccgtgcccactgcctgacagtatgctaggtatctgcaggtcgagcggtaggaaatggcctccgtgcgccgtcggcagtctgatcagttccacctgactgatctagtttgttcagtgtccgtcctctccccaccgtgtgcggcctggaacaggcttgtctgtcttgcttattgctacggacccacaccaggcacgtacacagtaggcgctcagtgtttgctgaaagaatgggcggagcaggcccagctttggtccagcagctccagccgaccccctgcccctcagcctcaggggtccccatgcctgccagggaggagctgatcgatgggatgacccagggtgcaggcccggcccaggccacccacctgatgcctgaagccacgtctcccctgccccgccccaggtgggcccggccggctcacagttcggcctcctcgcctgcctcttcgtggagctcttccagagctggccgctgctggagaggccctggaaggccttcctcaacctctcggccatcgtgctcttcctgttcatctgtggcctcctgccctggatcgacaacatcgcccacatcttcggcttcctcagtggcctgctgctggccttcgccttcctgccctacatcaccttcggcaccagcgacaagtaccgcaagcgggcactcatcctggtgtcactgctggcctttgccggcctcttcgccgccctcgtgctgtggctgtacatctaccccattaactggccctggatcgagcacctcacctgcttccccttcaccagccgcttctgcgagaagtatgagctggaccaggtgctgcactgaccgctgggccacacggctgcccctcagccctgctggaacagggtctgcctgcgagggctgccctctgcagagcgctctctgtgtgccagagagccagagacccaagacagggcccgggctctggacctgggtgcccccctgccaggcgaggctgactccgcgtgagatggttggttaaggcggggtttttctggggcgtgaggcctgtgagatcctgacccaagctcaggcacacccaaggcacctgcctctctgagtcttgggtctcagttcctaatatcccgctccttgctgagaccatctcctggggcagggtccttttcttcccaggtcctcagcgctgcctctgctggtgccttctcccccactactactggagcgtgcccttgctggggacgtggctgtgccctcagttgcccccagggctgggtgcccaccatgccccttcctctttctcctcctacctctgccctgtgagcccatccataaggctctcagatgggacattgtgggaaaggctttggccatggtctgggggcagagaacaaggggggagacacaagtagacctcaggtagaacgacactgggcggagccaccccagggcctgctcccagggagtgctcgaggcgcatcaggcccgttttttaccagtttatatcacggtcttcatttttaaaagtaacgctaactttgtagggacgatgtctcatggattaaataatattctttatggc

SEQ ID NO: 283 - DNA, 2682 bp, Homo sapiens
tttgccttcccgagcttcctggaggaggatgtggtcgatggggcagacacgtttgactcctccttttttagtaaggaagaaatgagctccatgcctgatgatgtctttgagtcccccccactctctgccagctacttccgagggatcccacactcagcctcccctgtctcccccgatggggtgcaaatccctctgaaggagtatggccgagccccagtccccgggccccggcgcggcaagcgcatcgcctccaaggtgaagcactttgcctttgatcggaagaagcggcactacggcctcggcgtggtgggcaactggctgaaccgcagctaccgccgcagcatcagcagcactgtgcagcggcagctggagagcttcgacagccaccggccctacttcacctactggctgaccttcgtccatgtcatcatcacgctgctggtgatttgcacgtatggcatcgcacccgtgggctttgcccagcacgtcaccacccagctggtgctgcggaacaaaggtgtgtacgagagcgtgaagtacatccagcaggagaacttctgggttggccccagctcgattgacctgatccacctgggggccaagttctcaccctgcatccggaaggacgggcagatcgagcagctggtgctgcgcgagcgagacctggagcgggactcaggctgctgtgtccagaatgaccactccggatgcatccagacccagcggaaggactgctcggagactttggccacttttgtcaagtggcaggatgacactgggccccccatggacaagtctgatctgggccagaagcggacttcgggggctgtctgccaccaggaccccaggacctgcgaggagccagcctccagcggtgcccacatctggcccgatgacatcactaagtggccgatctgcacagagcaggccaggagcaaccacacaggcttcctgcacatggactgcgagatcaagggccgcccctgctgcatcggcaccaagggcagctgtgagatcaccacccgggaatactgtgagttcatgcacggctatttccatgaggaagcaacactctgctcccaggtgcactgcttggacaaggtgtgtgggctgctgcccttcctcaaccctgaggtcccagatcagttctacaggctctggctgtctctcttcctacatgctgggtaagaggctcctcactgcccccgaacccgacccctgtgatggccacccagccggacccctggggaaaggttcctgggccagggcatggccggcccaacctgccgaagcctactgctcctgaagtgcctggctgaaggccgctgcctggtgtgtccctcccccagcgtggtgcactgcctcgtgtctgtggtctttcaaatgaccatcctgagggacctggagaagctggccggctggcaccgtatcgccatcatcttcatcctcagtggcatcacaggcaacctcgccagtgccatctttctcccataccgggcagaggtgggcccggccggctcacagttcggcctcctcgcctgcctcttcgtggagctcttccagagctggccgctgctggagaggccctggaaggccttcctcaacctctcggccatcgtgctcttcctgttcatctgtggcctcctgccctggatcgacaacatcgcccacatcttcggcttcctcagtggcctgctgctggccttcgccttcctgccctacatcaccttcggcaccagcgacaagtaccgcaagcgggcactcatcctggtgtcactgctggcctttgccggcctcttcgccgccctcgtgctgtggctgtacatctaccccattaactggccctggatcgagcacctcacctgcttccccttcaccagccgcttctgcgagaagtatgagctggaccaggtgctgcactgaccgctgggccacacggctgcccctcagccctgctggaacagggtctgcctgcgagggctgccctctgcagagcgctctctgtgtgccagagagccagagacccaagacagggcccgggctctggacctgggtgcccccctgccaggcgaggctgactccgcgtgagatggttggttaaggcggggtttttctggggcgtgaggcctgtgagatcctgacccaagctcaggcacacccaaggcacctgcctctctgagtcttgggtctcagttcctaatatcccgctccttgctgagaccatctcctggggcagggtccttttcttcccaggtcctcagcgctgcctctgctggtgccttctcccccactactactggagcgtgcccttgctggggacgtggctgtgccctcagttgcccccagggctgggtgcccaccatgccccttcctctttctcctcctacctctgccctgtgagcccatccataaggctctcagatgggacattgtgggaaaggctttggccatggtctgggggcagagaacaaggggggagacacaagtagacctcaggtagaacgacactgggcggagccaccccagggcctgctcccagggagtgctcgaggcgcatcaggcccgttttttaccagtttatatcacggtcttcatttttaaaagtaacgctaactttgtacggacgatgtctcatggattaaataatattctttatggcagtaaaaaaaaaaaaaaaaaaaa

SEQ ID NO: 284 - DNA, 2706 bp, Homo sapiens
ccacgcgtccgcgctgacccccggagtcctgtccctcacctccttcaccagtgtccgttctggctactcccacctgccacgccgcaagagaatgtctgtggcccacatgagcttgcaagctgccgctgccctcctcaaggggcgctcggtgctggatgccaccggacagcggtgccgggtggtcaagcgcagctttgccttcccgagcttcctggaggaggatgtggtcgatggggcagacacgtttgactcctccttttttagtaaggaagaaatgagctccatgcctgatgatgtctttgagtcccccccactctctgccagctacttccgagggatcccacactcagcctcccctgtctcccccgatggggtgcaaatccctctgaaggagtatggccgagccccagtccccgggccccggcgcggcaagcgcatcgcctccaaggtgaagcactttgcctttgatcggaagaagcggcactacggcctcggcgtggtgggcaactggctgaaccgcagctaccgccgcagcatcagcagcactgtgcagcggcagctggagagcttcgacagccaccggccctacttcacctactggctgaccttcgtccatgtcatcatcacgctgctggtgatttgcacgtatggcatcgcacccgtgggctttgcccagcacgtcaccacccagctggtgctgcggaacaaaggtgtgtacgagagcgtgaagtacatccagcaggagaacttctgggttggccccagctcgattgacctgatccacctgggggccaagttctcaccctgcatccggaaggacgggcagatcgagcagctggtgctgcgcgagcgagacctggagcgggactcaggctgctgtgtccagaatgaccactccggatgcatccagacccagcggaaggactgctcggagactttggccacttttgtcaagtggcaggatgacactgggccccccatggacaagtctgatctgggccagaagcggacttcgggggctgtctgccaccaggaccccaggacctgcgaggagccagcctccagcggtgcccacatctggcccgatgacatcactaagtggccgatctgcacagagcaggccaggagcaaccacacaggcttcctgcacatggactgcgagatcaagggccgcccctgctgcatcggcaccaagggcagctgtgagatcaccacccgggaatactgtgagttcatgcacggctatttccatgaggaagcaacactctgctcccaggtgcactgcttggacaaggtgtgtgggctgctgcccttcctcaaccctgaggtcccagatcagttctacaggctctggctgtctctcttcctacatgctggcgtggtgcactgcctcgtgtctgtggtctttcaaatgaccatcctgagggacctggagaagctggccggctggcaccgtatcgccatcatcttcatcctcagtggcatcacaggcaacctcgccagtgccatctttctcccataccgggcagaggtgggcccggccggctcacagttcggcctcctcgcctgcctcttcgtggagctcttccagagctggccgctgctggagaggccctggaaggccttcctcaacctctcggccatcgtgctcttcctgttcatctgtggcctcctgccctggatcgacaacatcgcccacatcttcggcttcctcagtggcctgctgctggccttcgccttcctgccctacatcaccttcggcaccagcgacaagtaccgcaagcgggcactcatcctggtgtcactgctggcctttgccggcctcttcgccgccctcgtgctgtggctgtacatctaccccattaactggccctggatcgagcacctcacctgcttccccttcaccagccgcttctgcgagaagtatgagctggaccaggtgctgcactgaccgctgggccacacggctgcccctcagccctgctggaacagggtctgcctgcgagggctgccctctgcagagcgctctctgtgtgccagagagccagagacccaagacagggcccgggctctggacctgggtgcccccctgccaggcgaggctgactccgcgtgagatggttggttaaggcggggtttttctggggcgtgaggcctgtgagatcctgacccaagctcaggcacacccaaggcacctgcctctctgagtcttgggtctcagttcctaatatcccgctccttgctgagaccatctcctggggcagggtccttttcttcccaggtcctcagcgctgcctctgctggtgccttctcccccactactactggagcgtgcccttgctggggacgtggctgtgccctcagttgcccccagggctgggtgcccaccatgccccttcctctttctcctcctacctctgccctgtgagcccatccataaggctctcagatgggacattgtgggaaaggctttggccatggtctgggggcagagaacaaggggggagacacaagtagacctcaggtagaacgacactgggcggagccaccccagggcctgctcccagggagtgctcgaggcgcatcaggcccgttttttaccagtttatatcacggtcttcatttttaaaagtaacgctaactttgtagggacgatgtctcatggattaaataatattctttatggcaaaaaaaaaaaaaaaaaaa

SEQ ID NO: 285 - DNA, 1982 bp, Homo sapiens
ggcgagaggcgggctgaggcggcccagcggcggcaggtgaggcggaaccaaccctcctggccatgggaggggccgtggtggacgagggccccacaggcgtcaaggcccctgacggcggctggggctgggccgtgctcttcggctgtttcgtcatcactggcttctcctacgccttccccaaggccgtcagtgtcttcttcaaggagctcatacaggagtttgggatcggctacagcgacacagcctggatctcctccatcctgctggccatgctctacgggacaggtccgctctgcagtgtgtgcgtgaaccgctttggctgccggcccgtcatgcttgtggggggtctctttgcgtcgctgggcatggtggctgcgtccttttgccggagcatcatccaggtctacctcaccactggggtcatcacggggttgggtttggcactcaacttccagccctcgctcatcatgctgaaccgctacttcagcaagcggcgccccatggccaacgggctggcggcagcaggtagccctgtcttcctgtgtgccctgagcccgctggggcagctgctgcaggaccgctacggctggcggggcggcttcctcatcctgggcggcctgctgctcaactgctgcgtgtgtgccgcactcatgaggcccctggtggtcacggcccagccgggctcggggccgccgcgaccctcccggcgcctgctagacctgagcgtcttccgggaccgcggctttgtgctttacgccgtggccgcctcggtcatggtgctggggctcttcgtcccgcccgtgttcgtggtgagctacgccaaggacctgggcgtgcccgacaccaaggccgccttcctgctcaccatcctgggcttcattgacatcttcgcgcggccggccgcgggcttcgtggcggggcttgggaaggtgcggccctactccgtctacctcttcagcttctccatgttcttcaacggcctcgcggacctggcgggctctacggcgggcgactacggcggcctcgtggtcttctgcatcttctttggcatctcctacggcatggtgggggccctgcagttcgaggtgctcatggccatcgtgggcacccacaagttctccagtgccattggcctggtgctgctgatggaggcggtggccgtgctcgtcgggcccccttcgggaggcaaactcctggatgcgacccacgtctacatgtacgtgttcatcctggcgggggccgaggtgctcacctcctccctgattttgctgctgggcaacttcttctgcattaggaagaagcccaaagagccacagcctgaggtggcggccgcggaggaggagaagctccacaagcctcctgcagactcgggggtggacttgcgggaggtggagcatttcctgaaggctgagcctgagaaaaacggggaggtggttcacaccccggaaacaagtgtctgagtggctgggcggggccggcaggcacagggaggaggtacagaagccggcaacgcttgctatttattttacaaactggactggctcaggcagggccacggctgggctccagctgccggcccagcggatcgtcgcccgatcagtgttttgagggggaaggtggcggggtgggaaccgtgtcattccagagtggatctgcggtgaagccaagccgcaaggttacaaggcatcctcaccaggggccccgcctgctgctcccaggtggcctgcggccactgctatgctcaaggacctggaaacccatgcttcgagacaacgtgactttaatgggagggtgggtgggccgcagacaggctggcagggcaggtgctgcgtggggccctctccagcccgtcctaccctgggctcacatggggcctgtgcccacccctcttgagtgtcttggggacagctctttccacccctggaagatggaaataaacctgcgtgtgggtggagtgttctcgtgccgaattcaaaaagctt

SEQ ID NO: 286 - DNA, 1982 bp, Homo sapiens; identical to SEQ ID NO: 285

SEQ ID NO: 287 - DNA, 3649 bp, Homo sapiens
agtcccagcccaagggtagctggaggcgcgcaggccggctccgctccggccccggacgatgcggcgcgcccaggatgctgccgtgcctcgtagtgctgctggcggcgctcctcagcctccgtcttggctcagacgctcatgggacagagctgcccagccctccgtctgtgtggtttgaagcagaatttttccaccacatcctccactggacacccatcccaaatcagtctgaaagtacctgctatgaagtggcgctcctgaggtatggaatagagtcctggaactccatctccaactgtagccagaccctgtcctatgaccttaccgcagtgaccttggacctgtaccacagcaatggctaccgggccagagtgcgggctgtggacggcagccggcactccaactggaccgtcaccaacacccgcttctctgtggatgaagtgactctgacagttggcagtgtgaacctagagatccacaatggcttcatcctcgggaagattcagctacccaggcccaagatggcccccgcaaatgacacatatgaaagcatcttcagtcacttccgagagtatgagattgccattcgcaaggtgccgggaaacttcacgttcacacacaagaaagtaaaacatgaaaacttcagcctcctaacctctggagaagtgggagagttctgtgtccaggtgaaaccatctgtcgcttcccgaagtaacaaggggatgtggtctaaagaggagtgcatctccctcaccaggcagtatttcaccgtgaccaacgtcatcatcttctttgcctttgtcctgctgctctccggagccctcgcctactgcctggccctccagctgtatgtgcggcgccgaaagaagctacccagtgtcctgctcttcaagaagcccagccccttcatcttcatcagccagcgtccctccccagagacccaagacaccatccacccgcttgatgaggaggcctttttgaaggtgtccccagagctgaagaacttggacctgcacggcagcacagacagtggctttggcagcaccaagccatccctgcagactgaagagccccagttcctcctccctgaccctcacccccaggctgacagaacgctgggaaacggggagccccctgtgctgggggacagctgcagtagtggcagcagcaatagcacagacagcgggatctgcctgcaggagcccagcctgagccccagcacagggcccacctgggagcaacaggtggggagcaacagcaggggccaggatgacagtggcattgacttagttcaaaactctgagggccgggctggggacacacagggtggctcggccttgggccaccacagtcccccggagcctgaggtgcctggggaagaagacccagctgctgtggcattccagggttacctgaggcagaccagatgtgctgaagagaaggcaaccaagacaggctgcctggaggaagaatcgcccttgacagatggccttggccccaaattcgggagatgcctggttgatgaggcaggcttgcatccaccagccctggccaagggctatttgaaacaggatcctctagaaatgactctggcttcctcaggggccccaacgggacagtggaaccagcccactgaggaatggtcactcctggccttgagcagctgcagtgacctgggaatatctgactggagctttgcccatgaccttgcccctctaggctgtgtggcagccccaggtggtctcctgggcagctttaactcagacctggtcaccctgcccctcatctctagcctgcagtcaagtgagtgactcgggctgagaggctgcttttgattttagccatgcctgctcctctgcctggaccaggaggagggcccctggggcagaagttaggcacgaggcagtctgggcacttttctgcaagtccactggggctggccccagccaggccctgcagggctggtcagggtgtctggggcaggaggaggccaactcactgaactagtgcagggtatgtgggtggcactgacctgttctgttgactggggccctgcagactctggcagagctgagaagggcagggaccttctccctcctaggaactctttcctgtatcataaaggattatttgctcaggggaaccatggggctttctggagttgtggtgaggccaccaggctgaagtcagctcagacccagacctccctgcttaggccactcgagcatcagagcttccagcaggaggaagggctgtaggaatggaagcttcagggccttgctgctggggtcatttttaggggaaaaaggaggatatgatggtcacatggggaacctcccctcatcgggcctctggggcaggaagcttgtcactggaagatcttaaggtatatattttctggacactcaaacacatcataatggattcactgaggggagacaaagggagccgagaccctggatggggcttccagctcagaacccatccctctggtgggtacctctggcacccatctgcaaatatctccctctctccaacaaatggagtagcatccccctggggcacttgctgaggccaagccactcacatcctcactttgctgccccaccatcttgctgacaacttccagagaagccatggttttttgtattggtcataactcagccctttgggcggcctctgggcttgggcaccagctcatgccagccccagagggtcagggttggaggcctgtgcttgtgtttgctgctaatgtccagctacagacccagaggataagccactgggcactgggctggggtccctgccttgttggtgttcagctgtgtgattttggactagccacttgtcagagggcctcaatctcccatctgtgaaataaggactccacctttaggggaccctccatgtttgctgggtattagccaagctggtcctgggagaatgcagatactgtccgtggactaccaagctggcttgtttcttatgccagaggctaacagatccaatgggagtccatggtgtcatgccaagacagtatcagacacagccccagaagggggcattatgggccctgcctccccataggccatttggactctgccttcaaacaaaggcagttcagtccacaggcatggaagctgtgaggggacaggcctgtgcgtgccatccagagtcatctcagccctgcctttctctggagcattctgaaaacagatattctggcccagggaatccagccatgacccccacccctctgccaaagtactcttaggtgccagtctggtaactgaactccctctggaggcaggcttgagggaggattcctcagggttcccttgaaagctttatttatttattttgttcatttatttattggagaggcagcattgcacagtgaaagaattctggatatctcaggagccccgaaattctagctctgactttgctgtttccagtggtatgaccttggagaagtcacttatcctcttggagcctcagtttcctcatctgcagaataatgactgacttgtctaattcgtagggatgtgaggttctgctgaggaaatgggtatgaatgtgccttgaacacaaagctctgtcaataagtgatacatgttttttattccaataaattgtcaagaccaca

SEQ ID NO: 288 - DNA, 3632 bp, Homo sapiens
aaagagctggaggcgcgcaggccggctccgctccggccccggacgatgcggcgcgcccaggatgctgccgtgcctcgtagtgctgctggcggcgctcctcagcctccgtcttggctcagacgctcatgggacagagctgcccagccctccgtctgtgtggtttgaagcagaatttttccaccacatcctccactggacacccatcccaaatcagtctgaaagtacctgctatgaagtggcgctcctgaggtatggaatagagtcctggaactccatctccaactgtagccagaccctgtcctatgaccttaccgcagtgaccttggacctgtaccacagcaatggctaccgggccagagtgcgggctgtggacggcagccggcactccaactggaccgtcaccaacacccgcttctctgtggatgaagtgactctgacagttggcagtgtgaacctagagatccacaatggcttcatcctcgggaagattcagctacccaggcccaagatggcccccgcgaatgacacatatgaaagcatcttcagtcacttccgagagtatgagattgccattcgcaaggtgccgggaaacttcacgttcacacacaagaaagtaaaacatgaaaacttcagcctcctaacctctggagaagtgggagagttctgtgtccaggtgaaaccatctgtcgcttcccgaagtaacaaggggatgtggtctaaagaggagtgcatctccctcaccaggcagtatttcaccgtgaccaacgtcatcatcttctttgcctttgtcctgctgctctccggagccctcgcctactgcctggccctccagctgtatgtgcggcgccgaaagaagctacccagtgtcctgctcttcaagaagcccagccccttcatcttcatcagccagcgtccctccccagagacccaagacaccatccacccgcttgatgaggaggcctttttgaaggtgtccccagagctgaagaacttggacctgcacggcagcacagacagtggctttggcagcaccaagccatccctgcagactgaagagccccagttcctcctccctgaccctcacccccaggctgacagaacgctgggaaacggggagccccctgtgctgggggacagctgcagtagtggcagcagcaatagcacagacagcgggatctgcctgcaggagcccagcctgagccccagcacagggcccacctgggagcaacaggtggggagcaacagcaggggccaggatgacagtggcattgacttagttcaaaactctgagggccgggctggggacacacagggtggctcggccttgggccaccacagtcccccggagcctgaggtgcctggggaagaagacccagctgctgtggcattccagggttacctgaggcagaccagatgtgctgaagagaaggcaaccaagacaggctgcctggaggaagaatcgcccttgacagatggccttggccccaaattcgggagatgcctggttgatgaggcaggcttgcatccaccagccctggccaagggctatttgaaacaggatcctctagaaatgactctggcttcctcaggggccccaacgggacagtggaaccagcccactgaggaatggtcactcctggccttgagcagctgcagtgacctgggaatatctgactggagctttgcccatgaccttgcccctctaggctgtgtggcagccccaggtggtctcctgggcagctttaactcagacctggtcaccctgcccctcatctctagcctgcagtcaagtgagtgactcgggctgagaggctgcttttgattttagccatgcctgctcctctgcctggaccaggaggagggccctggggcagaagttaggcacgaggcagtctgggcacttttctgcaagtccactggggctggcccagccaggctgcagggctggtcagggtgtctggggcaggaggaggccaactcactgaactagtgcagggtatgtgggtggcactgacctgttctgttgactggggccctgcagactctggcagagctgagaagggcagggaccttctccctcctaggaactctttcctgtatcataaaggattatttgctcaggggaaccatggggctttctggagttgtggtgaggccaccaggctgaagtcagctcagacccagacctccctgcttaggccactcgagcatcagagcttccagcaggaggaagggctgtaggaatggaagcttcagggccttgctgctggggtcatttttaggggaaaaaggaggatatgatggtcacatggggaacctcccctcatcgggcctctggggcaggaagcttgtcactggaagatcttaaggtatatattttctggacactcaaacacatcataatggattcactgaggggagacaaagggagccgagaccctggatggggcttccagctcagaacccatccctctggtgggtacctctggcacccatctgcaaatatctccctctctccaacaaatggagtagcatccccctggggcacttgctgaggccaagccactcacatcctcactttgctgccccaccatcttgctgacaacttccagagaagccatggttttttgtattggtcataactcagccctttgggcggcctctgggcttgggcaccagctcatgccagccccagagggtcagggttggaggcctgtgcttgtgtttgctgctaatgtccagctacagacccagaggataagccactgggcactgggctggggtccctgccttgttggtgttcagctgtgtgattttggactagccacttgtcagagggcctcaatctcccatctgtgaaataaggactccacctttaggggaccctccatgtttgctgggtattagccaagctggtcctgggagaatgcagatactgtccgtggactaccaagctggcttgtttcttatgccagaggctaacagatccaatgggagtccatggtgtcatgccaagacagtatcagacacagccccagaagggggcattatgggccctgcctccccataggccatttggactctgccttcaaacaaaggcagttcagtccacaggcatggaagctgtgaggggacaggcctgtgcgtgccatccagagtcatctcagccctgcctttctctggagcattctgaaaacagatattctggcccagggaatccagccatgacccccacccctctgccaaagtactcttaggtgccagtctggtaactgaactccctctggaggcaggcttgagggaggattcctcagggttcccttgaaagctttatttatttattttgttcatttatttattggagaggcagcattgcacagtgaaagaattctggatatctcaggagccccgaaattctagctctgactttgctgtttccagtggtatgaccttggagaagtcacttatcctcttggagcctcagtttcctcatctgcagaataatgactgacttgtctaattcatagggatgtgaggttctgctgaggaaatgggtatgaatgtgccttgaacacaaagctctgtcaataagtgatacatgttttttattccaataaattgtcaagaccaca

SEQ ID NO: 289 - DNA, 3691 bp, Homo sapiens
tggaggcgcgcaggccggctccgctccggccccggacgatgcggcgcgcccaggatgctgccgtgcctcgtagtgctgctggcggcgctcctcagcctccgtcttggctcagacgctcatgggacagagctgcccagccctccgtctgtgtggtttgaagcagaatttttccaccacatcctccactggacacccatcccaaatcagtctgaaagtacctgctatgaagtggcactcctgaggtatggaatagagtcctggaactccatctccaactgtagccagaccctgtcctatgaccttaccgcagtgaccttggacctgtaccacagcaatggctaccgggccagagtgcgggctgtggacggcagccggcactccaactggaccgtcaccaacacccgcttctctgtggatgaagtgactctgacagttggcagtgtgaacctagagatccacaatggcttcatcctcgggaagattcagctacccaggcccaagatggcccccgcaaatgacacatatgaaagcatcttcagtcacttccgagagtatgagattgccattcgcaaggtgccgggaaacttcacgttcacacacaagaaagtaaaacatgaaaacttcagcctcctaacctctggagaagtgggagagttctgtgtccaggtgaaaccatctgtcgcttcccgaagtaacaaggggatgtggtctaaagaggagtgcatctccctcaccaggcagtatttcaccgtgaccaacgtcatcatcttctttgcctttgtcctgctgctctccggagccctcgcctactgcctggccctccagctgtatgtgcggcgccgaaagaagctacccagtgtcctgctcttcaagaagcccagccccttcatcttcatcagccagcgtccctccccagagacccaagacaccatccacccgcttgatgaggaggcctttttgaaggtgtccccagagctgaagaacttggacctgcacggcagcacagacagtggctttggcagcaccaagccatccctgcagactgaagagccccagttcctcctccctgaccctcacccccaggctgacagaacgctgggaaacggggagccccctgtgctgggggacagctgcagtagtggcagcagcaatagcacagacagcgggatctgcctgcaggagcccagcctgagccccagcacagggcccacctgggagcaacaggtggggagcaacagcaggggccaggatgacagtggcattgacttagttcaaaactctgagggccgggctggggacacacagggtggctcggccttgggccaccacagtcccccggagcctgaggtgcctggggaagaagacccagctgctgtggcattccagggttacctgaggcagaccagatgtgctgaagagaaggcaaccaagacaggctgcctggaggaagaatcgcccttgacagatggccttggccccaaattcgggagatgcctggttgatgaggcaggcttgcatccaccagccctggccaagggctatttgaaacaggatcctctagaaatgactctggcttcctcaggggccccaacgggacagtggaaccagcccactgaggaatggtcactcctggccttgagcagctgcagtgacctgggaatatctgactggagctttgcccatgaccttgcccctctaggctgtgtggcagccccaggtggtctcctgggcagctttaactcagacctggtcaccctgcccctcatctctagcctgcagtcaagtgagtgactcgggctgagaggctgcttttgattttagccatgcctgctcctctgcctggaccaggaggagggcccctggggcagaagttaggcacgaggcagtctgggcacttttctgcaagtccactggggctggccccagccaggccctgcagggctggtcagggtgtctggggcaggaggaggccaactcactgaactagtgcagggtatgtgggtggcactgacctgttctgttgactggggccctgcagactctggcagagctgagaagggcagggaccttctccctcctaggaactctttcctgtatcataaaggattatttgctcaggggaaccatggggctttctggagttgtggtgaggccaccaggctgaagtcagctcagacccagacctccctgcttaggccactcgagcatcagagcttccagcaggaggaagggctgtaggaatggaagcttcagggccttgctgctggggtcatttttaggggaaaaaggaggatatgatggtcacatggggaacctcccctcatcgggcctctggggcaggaagcttgtcactggaagatcttaaggtatatattttctggacactcaaacacatcataatggattcactgaggggagacaaagggagccgagaccctggatggggcttccagctcagaacccatccctctggtgggtacctctggcacccatctgcaaatatctccctctctccaacaaatggagtagcatccccctggggcacttgctgaggccaagccactcacatcctcactttgctgccccaccatcttgctgacaacttccagagaagccatggttttttgtattggtcataactcagccctttgggcggcctctgggcttgggcaccagctcatgccagccccagagggtcagggttggaggcctgtgcttgtgtttgctgctaatgtccagctacagacccagaggataagccactgggcactgggctggggtccctgccttgttggtgttcagctgtgtgattttggactagccacttgtcagagggcctcaatctcccatctgtgaaataaggactccacctttaggggaccctccatgtttgctgggtattagccaagctggtcctgggagaatgcagatactgtccgtggactaccaagctggcttgtttcttatgccagaggctaacagatccaatgggagtccatggtgtcatgccaagacagtatcagacacagccccagaagggggcattatgggccctgcctccccataggccatttggactctgccttcaaacaaaggcagttcagtccacaggcatggaagctgtgaggggacaggcctgtgcgtgccatccagagtcatctcagccctgcctttctctggagcattctgaaaacagatattctggcccagggaatccagccatgacccccacccctctgccaaagtactcttaggtgccagtctggtaactgaactccctctggaggcaggcttgagggaggattcctcagggttcccttgaaagctttatttatttattttgttcatttatttattggagaggcagcattgcacagtgaaagaattctggatatctcaggagccccgaaattctagctctgactttgctgtttccagtggtatgaccttggagaagtcacttatcctcttggagcctcagtttcctcatctgcagaataatgactgacttgtctaattcgtagggatgtgaggttctgctgaggaaatgggtatgaatgtgccttgaacacaaagctctgtcaataagtgatacatgttttttattccaataaattgtcaagaccacaaaaaaaaaaaaaaaaaaaaaaaaaaaaaaaaaaaaaaaaaaaaaaaaaaaaaaaaaaaaaaa

SEQ ID NO: 290 - DNA, 946 bp, Homo sapiens
ggaaacccaagaggaaatgactgagcccgtctgggtccccgcccgctcgcgctcccctggccacaccctccgcctggacgcagcagccaccgccgcgtccctctctccacgaggctgccggcttaggacccccagctccgacatgtcgccctctggtcgcctgtgtcttctcaccatcgttggcctgattctccccaccagaggacagacgttgaaagataccacgtccagttcttcagcagactcaactatcatggacattcaggtcccgacacgagccccagatgcagtctacacagaactccagcccacctctccaaccccaacctggcctgctgatgaaacaccacaaccccagacccagacccagcaactggaaggaacggatgggcctctagtgacagatccagagacacacaagagcaccaaagcagctcatcccactgatgacaccacgacgctctctgagagaccatccccaagcacagacgtccagacagacccccagaccctcaagccatctggttttcatgaggatgaccccttcttctatgatgaacacaccctccggaaacgggggctgttggtcgcagctgtgctgttcatcacaggcatcatcatcctcaccagtggcaagtgcaggcagctgtcccggttatgccggaatcgttgcaggtgagtccatcagaaacaggagctgacaacctgctgggcacccgaagaccaagccccctgccagctcaccgtgcccagcctcctgcatcccctcgaagagcctggccagagagggaagacacagatgatgaagctggagccagggctgccggtccgagtctcctacctcccccaaccctgcccgcccctgaaggctacctggcgccttgggggctgtccctcaagttatctcctctgctaagacaaaaagtaaagcactgtggtctttgcc

SEQ ID NO: 291 - DNA, 647 bp, Homo sapiens
tgcacaccagctgtgtagatgtgggagaggggtttcttccagatgcagactctcagtaatatcccttgtttctgcctccatggctcactcctgccctccactgatctggccactctctcagctcatcccactgatgacaccacgacgctctctgagagaccatccccaagcacagacgtccagacagacccccagaccctcaagccatctggttttcatgaggatgaccccttcttctatgatgaacacaccctccggaaacgggggctgttggtcgcagctgtgctgttcatcacaggcatcatcatcctcaccagtggcaagtgcaggcagctgtcccggttatgccggaatcattgcaggtgagtccatcagaaacaggagctgacaacccgctgggcacccgaagaccaagccccctgccagctcaccgtgcccagcctcctgcatcccctcgaagagcctggccagagagggaagacacagatgatgaagctggagccagggctgccggtccgagtctcctacctcccccaaccctgcccgcccctgaaggctacctggcgccttgggggctgtccctcaagttatctcctctgttaagacaaaaagtaaagcactgtggtctttgcaaaaaaaaaaaaaaa

SEQ ID NO: 292 - DNA, 1283 bp, Homo sapiens
cggacgcgtgggcgttactcactcttcctccttcccctcctcgccgactcccgggctctgggcccctgggggagggaagaggcctcctatctactcctctgccccagtcccctccttgcgtcagtcccagtgagggataagcgcctggcggaaggcgcagggaggtgtttctctgcttcaggagtgcccgccggcccttgcagctgctggaagacccatttatctcatgcttcttgttttctttggggacctgcaggggaaggaagcagggtgacggtttggtatccccacctaagaccctcccctttcccctgaggccagccgtcagcccctggcagggggtcttggaagccagaggtttttgctcagggcagggaaagggctgcaggatccccgggggctgccggaggtcggtctcactgacatcatggctgaccccagcatcgcctggtcccacagatgtcgccctctggtcgcctgtgtcttcttaccatcgttggcctgattctccccaccagaggacagacgttgaaagataccacgtccagttcttcagcagactcaactatcatggacattcaggtcccgacacgagccccagatgcagtctacacagaactccagcccacctctccaaccccaacctggcctgctgatgaaacaccacaaccccagacccagacccagcaactggaaggaacggatgggcctctagtgacagatccagagacacacaagagcaccaaagcagctcatcccactgatgacaccacgacgctctctgagagaccatccccaagcacagacgtccagacagacccccagaccctcaagccatctggttttcatgaggatgaccccttcttctatgatgaacacaccctccggaaacgggggctgttggtcgcagctgtgctgttcatcacaggcatcatcatcctcaccagtggcaagtgcaggcagctgtcccggttatgccggaatcattgcaggtgagtccatcagaaacaggagctgacaacccgctgggcacccgaagaccaagccccctgccagctcaccgtgcccagcctcctgcatcccctcgaagagcctggccagagagggaagacacagatgatgaagctggagccagggctgccggtccgagtctcctacctcccccaaccctgcccgcccctgaaggctacctggcgccttgggggctgtccctcaagttatctcctctgttaagacaaaaagtaaagcactgtggtctttgaaaaaaaaaaaaaaaaaaaaaa

SEQ ID NO: 293 - DNA, 872 bp, Homo sapiens
ggacgcagcagccaccgccgcgtccctctctccacgaggctgccggcttaggacccccagctccgacatgtcgccctctggtcgcctgtgtcttctcaccatcgttggcctgattctccccaccagaggacagacgttgaaagataccacgtccagttcttcagcagactcaactatcatggacattcaggtcccgacacgagccccagatgcagtctacacagaactccagcccacctctccaaccccaacctggcctgctgatgaaacaccacaaccccagacccagacccagcaactggaaggaacggatgggcctctagtgacagatccagagacacacaagagcaccaaagcagctcatcccactgatgacaccacgacgctctctgagagaccatccccaagcacagacgtccagacagacccccagaccctcaagccatctggttttcatgaggatgaccccttcttctatgatgaacacaccctccggaaacgggggctgttggtcgcagctgtgctgttcatcacaggcatcatcatcctcaccagtggcaagtgcaggcagctgtcccggttatgccggaatcattgcaggtgagtccatcagaaacaggagctgacaacctgctgggcacccgaagaccaagccccctgccagctcaccgtgcccagcctcctgcatcccctcgaagagcctggccagagagggaagacacagatgatgaagctggagccagggctgccggtccaagtctcctacctcccccaaccctgcccgcccctgaaggctacctggcgccttgggggctgtccctcaagttatctcctctgctaagacaaaaagtaaagcactgtggtctttgccc

SEQ ID NO: 294 - DNA, 1638 bp, Homo sapiens
tccacgaggctgccggcttaggacccccagctccgacgtaagtccctctcgcgcgccacctccatccgctgcccctctgcccacgggccgggctcaggtgggtaggggtttgaccccttccgctcctctccgccccccatccacgcccacatctctctgcctcctctcctgggctacagtgggccgctctgcctcgctcccgcccgcctgcctcagtctccccagctctctgccacccccctcggaccagtgcctcttaggtctctccagcgcgccatccctgcaaggcggcccctgacaccaactcactttttcctctgagcgcgggaggcgttactcactcttcctccttcccctcctcgccgactcccgggctctgggcccctgggggagggaagaggcctcctatctactcctctgccccagtcccctccttgcgtcagtcccagtgagggataagcgcctggcggaaggcgcagggaggtgtttctctgcttcaggagtgcccgccggcccttgcagctgctggaagacccatttatctcatgcttcttgttttctttggggacctgcaggggaaggaagcagggtgacggtttggtatccccacctaagaccctcccctttcccctgaggccagccgtcagcccctggcagggggtcttggaagccagaggtttttgctcagggcagggaaagggctgcaggatccccgggggctgccggaggtcggtctcactgacatcatggctgaccccagcatcgcctggtcccacagatgtcgccctctggtcgcctgtgtcttctcaccatcgttggcctgattctccccaccagaggacagacgttgaaagataccacgtccagttcttcagcagactcaactatcatggacattcaggtcccgacacgagccccagatgcagtctacacagaactccagcccacctctccgaccccaacctggcctgctgatgaaacaccacaaccccagacccagacccagcaactggaaggaacggatgggcctctagtgacagatccagagacacacaagagcaccaaagcagctcatcccactgatgacaccacgacgctctctgagagaccatccccaagcacagacgtccagacagacccccagaccctcaagccatctggttttcatgaggatgaccccttcttctatgatgaacacaccctccggaaacgggggctgttggtcgcagctgtgctgttcatcacaggcatcatcatcctcaccagtggcaagtgcaggcagctgtcccggttatgccggaatcgttgcaggtgagtccatcagaaacaggagctgacaacctgctgggcacccgaagaccaagccccctgccagctcaccgtgcccagcctcctgcatcccctcgaagagcctggccagagagggaagacacagatgatgaagctggagccagggctgccggtccgagtctcctacctcccccaaccctgcccgcccctgaaggctacctggcgccttgggggctgtccctcaagttatctcctctgctaagacaaaaagtaaagcactgtggtctttgccaaaaaaaaaaaaaaaaaaaaaaaaaaaaaaaaaaaaaaaaaaaaaaaaaaaaaaaa

SEQ ID NO: 295 - DNA, 889 bp, Homo sapiens
ctctctccacgaggctgccggcttaggacccccagctccgacatgtcgccctctggtcgcctgtgtcttctcaccatcgttggcctgattctccccaccagaggacagacgttgaaagataccacgtccagttcttcagcagacgcaactatcatggacattcaggtcccgacacgagccccagatgcagtctacacagaactccagcccacctctccaaccccaacctggcctgctgatgaaacaccacaaccccagacccagacccagcaactggaaggaacggatgggcctctagtgacagatccagagacacacaagagcaccaaagcagctcatcccactgatgacaccacgacgctctctgagagaccatccccaagcacagacgtccagacagacccccagaccctcaagccatctggttttcatgaggatgaccccttcttctatgatgaacacaccctccggaaacgggggctgttggtcgcagctgtgctgttcatcacaggcatcatcatcctcaccagtggcaagtgcaggcagctgtcccggttatgccggaatcattgcaggtgagtccatcagaaacaggagctgacaacctgctgggcacccgaagaccaagccccctgccagctcaccgtgcccagcctcctgcatcccctcgaagagcctggccagagagggaagacacagatgatgaagctggagccagggctgccggtccgagtctcctacctcccccaaccctgcccgcccctgaaggctacctggcgccttgggggctgtccctcaagttatctcctctgctaagacaaaaagtaaagcactgtggtctttgcaaaaaaaaaaaaaaaaaaaaaaaaaaaaaaaaaaaaaaaaaaaa

SEQ ID NO: 296 - DNA, 841 bp, Homo sapiens
ccagctccgacatgtcgccctctggtcgcctgtgtcttctcaccatcgttggcctgattctccccaccagaggacagacgttgaaagataccacgtccagttcttcagcagactcaactatcatggacattcaggtcccgacacgagccccagatgcagtctacacagaactccagcccacctctccaaccccaacctggcctgctgatgaaacaccacaaccccagacccagacccagcaactggaaggaacggatgggcctctagtgacagatccagagacacacaagagcaccaaagcagctcatcccactgatgacaccacgacgctctctgagagaccatccccaagcacagacgtccagacagacccccagaccctcaagccatctggttttcatgaggatgaccccttcttctatgatgaatcacacctccggaaacgggggctgttggtcgcagctgtgctgttcatcacaggcatcatcatcctcaccagtggcaagtgcaggcagctgtcccggttatgccggaatcattgcaggtgagtccatcagaaacaggagctgacaacctgctgggcacccgaagaccaagccccctgccagctcaccgtgcccagcctcctgcatcccctcgaagagcctggccagagagggaagacacagatgatgaagctggagccagggctgccggtccgagtctcctacctcccccaaccctgcccgcccctgaaggctacctggcgccttgggggctgtccctcaagttatctcctctgctaagacaaaaagtaaagcactgtggtctttgcaaaaaaaaaaaaaaaaaaaaaaaaaaa

SEQ ID NO: 297 - DNA, 695 bp, Homo sapiens
aagatttcagctgcgggacggtcaggggagacctccaggcgcagggaaggacggccagggtgacacggaagcatgcgacggctgctgatccctctggccctgtggctgggcgcggtgggcgtgggcgtcgccgagctcacggaagcccagcgccggggcctgcaggtggccctggaggaatttcacaagcacccgcccgtgcagtgggccttccaggagaccagtgtggagagcgccgtggacacgcccttcccagctggaatatttgtgaggctggaatttaagctgcagcagacaagctgccggaagagggactggaagaaacccgagtgcaaagtcaggcccaatgggaggaaacggaaatgcctggcctgcatcaaactgggctctgaggacaaagttctgggccggttggtccactgccccatagagacccaagttctgcgggaggctgaggagcaccaggagacccagtgcctcagggtgcagcgggctggtgaggacccccacagcttctacttccctggacagttcgccttctccaaggccctgccccgcagctaagccagcactgagctgcgtggtgcctccaggaccgctgccggtggtaaccagtggaagaccccagcccccagggagaggaccccgttctatccccagccatgataataaagctgctctcccagctgcctctc

SEQ ID NO: 298 - DNA, 734 bp, Homo sapiens
gcgggacggtcaggggagacctccaggcgcagggaaggacggccagggtgacacggaagcatgcgacggctgctgatccctctggccctgtggctgggtgcggtgggcgtgggcgtcgccgagctcacggaagcccagcgccggggcctgcaggtggccctggaggaatttcacaagcacccgcccgtgcagtgggccttccaggagaccagtgtggagagcgccgtggacacgcccttcccagctggaatatttgtgaggctggaatttaagctgcagcagacaagctgccggaagagggactggaagaaacccgagtgcaaagtcaggcccaatgggaggaaacggaaatgcctggcctgcatcaaactgggctctgaggacaaagttctgggccggttggtccactgccccatagagacccaagttctgcgggaggctgaggagcaccaggagacccagtgcctcagggtgcagcgggctggtgaggacccccacagcttctacttccctggacagttcgccttctccaaggccctgccccgcagctaagccagcactgagctgcgtggtgcctccaggaccgctgcgggtggtaaccagtggaagaccccagcccccagggagaggaacccgttctatccccagccatgataataaagctgctctcccaaaaaaaaaaaaaaaaaaaaaaaaaaaaaaaaaaaaaaaaaaaaaaaaaaaaaaaaaaaaaa

SEQ ID NO: 299 - DNA, 701 bp, Homo sapiens
ggcacgaggggggagacctccaggcgcagggaaggacggccagggtgacacggaagcatgcgacggctgctgatccctctggccctgtggctgggcgcggtgggcgtgggcgtcgccgagctcacggaagcccagcgccggggcctgcaggtggccctggaggaatttcacaagcacccgcccgtgcagtgggccttccaggagaccagtgtggagagcgccgtggacacgcccttcccagctggaatatttgtgaggctggaatttaagctgcagcagacaagctgccggaagagggactggaagaaacccgagtgcaaagtcaggcccaatgggaggaaacggaaatgcctggcctgcatcaaactgggctctgaggacaaagttctgggccggttggtccactgccccatagagacccaagttctgcgggaggctgaggagcaccaggagacccagtgcctcagggtgcagcgggctggtgaggacccccacagcttctacttccctggacagttcgccttctccaaggccctgccccgcagctaagccagcactgagctgcgtggtgcctccaggaccgctgccggtggtaaccagtggaagaccccagcccccagggagaggaccccgttctatccccagccatgataataaagctgctctcccagctgcctctcaaaaaaaaaaaaaaaaaaaaa

SEQ ID NO: 300 - DNA, 1906 bp, Homo sapiens
cagaagagcgggaagaggcggacagcgaggccaagatttcagctgcgggacggtcaggggagacctccaggcgcagggaaggacgtgaggaggggaagcgggctggggcggcagccgggcggaggggcagctgcgcaggcggaatgaggaacgcctttgctctaaggcgaccaccctggcagctcttcactgaggggcctcggtttccacatctgtcgctctccggtcccaagaccaccaggaccgacggggctctccgggagggtcagcccctccggtggccccagtcatgcatcaggggacggatcagaagggctaggaagaggggtcgtggggaaggccccagaaaaaagaggaaggagggaagattttgcctgaagcgggaaagccaagggctgggcggcgcgagacccccattcctagcgactggggctggctggtggcccgcggcagcccccgcgccgggaggattaggcctcccgccgctcccacccgtccggaccctcccacgtgtttaggtcctcccaaaagtattcggcctccggcccctgccccttcccccggctggcctggacctcggggacgtggggggaaccccgtgggagcagggggattctggacggggagggagtagcggttggggagaaggctgagcggggaaaggagagaggggctccggggacggcagggaggagagtgggtcgtgccggagacccagggagagacacaatgggcaagattaggggtgtagggtgggagtgcgaactgactgattcctagcgtgggcagggaactttgctaaaactgcaggccccagggaacagcgcgggcagggtgggagggaacggagagggccaggcggaccctaaggtcaatttggagaaagggccatttccaggctccttcacctgtgcccagcgttctacaggcctggaccccgcccccgctccccaccctccccccagagcagggcgcgggaggaggcggctcgggctggctcggagagctgaggggcgcacacccgcttcgcagggccagggtgacacggaagcatgcgacggctgctgatccctctggccctgtggctgggtgcggtgggcgtgggcgtcgccgagctcacggaagcccagcgccggggcctgcaggtggccctggaggaatttcacaagcacccgcccgtgcagtgggccttccaggagaccagtgtggagagcgccgtggacacggtgagtagcatggcccgggcaggagcggggagggtcgtaccccaggagaccagcgcattcccacgaagggggacagaagtgcttgggctctgagccccagccctttggagaaaaggccactgtccagcctgctggaatgtgactgcgtgagggaggtgcggatcacaccagggcttgctctgcaccctcagctggctaccggccatcctctgcctgcctgtctgtccgcagccctttcccagctggaatatttgtgaggctggaatttaagctgcagcagacaagctgccggaagagggactgggagaaacccgagtgcaaagtcaggcccaatgggaggaaacggaaatgcctggcctgcatcaaactgggctctgaggacaaagttctgggccggttggtccactgccccatagagacccaagttctgcgggaggctgaggagcaccaggagacccagtgcctcagggtgcagcgggctggtgaggacccccacagcttctacttccctggacagttcgccttctccaaggccctgccccgcagctaagccagcactgagatgcgtggtgcctccaggaccgctgcgggggtaaccagtggaagaccccagcccccagggagaggaacccgttctatccccagccatgataataaagctgctctcccagctgcctctc

SEQ ID NO: 301 - DNA, 770 bp, Homo sapiens
accggtccggaattcccgggtcgacccacgcgtccggcgggacggtcaggggagacctccaggcgcagggaaggacggccagggtgacacggaagcatgcgacggctgctgatccctctggccctgtggctgggtgcggtgggcgtgggcgtcgccgagctcacggaagcccagcgccggggcctgcaggtggccctggaggaatttcacaagcacccgcccgtgcagtgggccttccaggagaccagtgtggagagcgccgtggacacgcccttcccagctggaatatttgtgaggctggaatttaagctgcagcagacaagctgccggaagagggactggaagaaacccgagtgcaaagtcaggcccaatgggaggaaacggaaatgcctggcctgcatcaaactgggctctgaggacaaagttctgggccggttggtccactgccccatagagacccaagttctgcgggaggctgaggagcaccaggagacccagtgcctcagggtgcagcgggctggtgaggacccccacagcttctacttccctggacagttcgccttctccaaggccctgccccgcagctaagccagcactgagctgcgtggtgcctccaggaccgctgcgggtggtaaccagtggaagaccccagcccccagggagaggaacccgttctatccccagccatgataataaagctgctctcccaaaaaaaaaaaaaaaaaaaaaaaaaaaaaaaaaaaaaaaaaaaaaaaaaaaaaaaaaaaaaa

SEQ ID NO: 302 - DNA, 4698 bp, Homo sapiens
ctgccactcttcctgcaacggcccaggagctcagagctccacatctgaccttctagtcatgaccaggaccagggcagcactcctcctgttcacagccttagcaacttctctaggtttcaacttggacacagaggagctgacagccttccgtgtggacagcgctgggtttggagacagcgtggtccagtatgccaactcctgggtggtggttggagccccccaaaagataacagctgccaaccaaacgggtggcctctaccagtgtggctacagcactggtgcctgtgagcccatcggcctgcaggtgcccccggaggccgtgaacatgtccctgggcctgtccctggcgtctaccaccagcccttcccagctgctggcctgcggccccaccgtgcaccacgagtgcgggaggaacatgtacctcaccggactctgcttcctcctgggccccacccagctcacccagaggctcccggtgtccaggcaggagtgcccaagacaggagcaggacattgtgttcctgatcgatggctcaggcagcatctcctcccgcaactttgccacgatgatgaacttcgtgagagctgtgataagccagttccagagacccagcacccagttttccctgatgcagttctccaacaaattccaaacacacttcactttcgaggaattcaggcgcacgtcaaaccccctcagcctgttggcttctgttcaccagctgcaagggtttacatacacggccaccgccatccaaaatgtcgtgcaccgattgttccatgcctcatatggggcccgtagggatgccaccaaaattctcattgtcatcactgatgggaagaaagaaggcgacagcctggattataaggatgtcatccccatggctgatgcagcaggcatcatccgctatgcaattggggttggattagcttttcaaaacagaaattcttggaaagaattaaatgacattgcatcgaagccctcccaggaacacatatttaaagtggaggactttgatgctctgaaagatattcaaaaccaactgaaggagaagatctttgccattgagggtacggagaccacaagcagtagctccttcgaattggagatggcacaggagggcttcagcgctgtgttcacacctgatggccccgttctgggggctgtggggagcttcacctggtctggaggtgccttcctgtaccccccaaatatgagccctaccttcatcaacatgtctcaggagaatgtggacatgagggactcttacctgggttactccaccgagctggccctctggaaaggggtgcagagcctggtcctgggggccccccgctaccagcacaccgggaaggctgtcatcttcacccaggtgtccaggcaatggaggatgaaggccgaagtcacggggactcagatcggctcctacttcggggcctccctctgctccgtggacgtagacaccgacggcagcaccgacctggtcctcatcggggccccccattactacgagcagacccgagggggccaggtgtctgtgtgtcccttgcccagggggtggagaaggtggtggtgtgatgctgttctctacggggagcagggccacccctggggtcgctttggggcggctctgacagtgctgggggatgtgaatggggacaagctgacagacgtggtcatcggggccccaggagaggaggagaaccggggtgctgtctacctgtttcacggagtcttgggacccagcatcagcccctcccacagccagcggatcgcgggctcccagctctcctccaggctgcagtattttgggcaggcactgagcgggggtcaagacctcacccaggatggactggtggacctggctgtgggggcccggggccaggtgctcctgctcaggaccagacctgtgctctgggtgggggtgagcatgcagttcatacctgccgagatccccaggtctgcgtttgagtgtcgggagcaggtggtctctgagcagaccctggtacagtccaacatctgcctttacattgacaaacgttctaagaacctgcttgggagccgtgacctccaaagctctgtgaccttggacctggccctcgaccctggccgcctgagtccccgtgccaccttccaggaaacaaagaaccggagtctgagccgagtccgagtcctcgggctgaaggcacactgtgaaaacttcaacctgctgctcccgagctgcgtggaggactctgtgacccccattaccttgcgtctgaacttcacgctggtgggcaagcccctccttgccttcagaaacctgcggcctatgctggccgcactggctcagagatacttcacggcctccctaccctttgagaagaactgtggagccgaccatatctgccaggacaatctcggcatctccttcagcttcccaggcttgaagtccctgctggtggggagtaacctggagctgaacgcagaagtgatggtgtggaatgacggggaagactcctacggaaccaccatcaccttctcccaccccgcaggactgtcctaccgctacgtggcagagggccagaaacaagggcagctgcgttccctgcacctgacatgtgacagcgccccagttgggagccagggcacctggagcaccagctgcagaatcaaccacctcatcttccgtggcggcgcccagatcaccttcttggctacctttgacgtctcccccaaggctgtcctgggagaccggctgcttctgacagccaatgtgagcagtgagaacaacactcccaggaccagcaagaccaccttccagctggagctcccggtgaagtatgctgtctacactgtggttagcagccacgaacaattcaccaaatacctcaacttctcagagtctgaggagaaggaaagccatgtggccatgcacagataccaggtcaataacctgggacagagggacctgcctgtcagcatcaacttctgggtgcctgtggagctgaaccaggaggctgtgtggatggatgtggaggtctcccacccccagaacccatcccttcggtgctcctcagagaaaatcgcacccccagcatctgacttcctggcgcacattcagaagaatcccgtgctggactgctccattgctggctgcctgcggttccgctgtgacgtcccctccttcagcgtccaggaggagctggatttcaccctgaagggcaacctcagctttggctgggtccgccagatattgcagaagaaggtgtcggtcgtgagtgtggctgaaattacgttcgacacatccgtgtactcccagcttccaggacaggaggcatttatgagagctcagacgacaacggtgctggagaagtacaaggtccacaaccccacccccctcatcgtaggcagctccattgggggtctgttgctgctggcactcatcacagcggtactgtacaaagttggcttcttcaagcgtcagtacaaggaaatgatggaggaggcaaatggacaaattgccccagaaaacgggacacagacccccagcccgcccagtgagaaatgatccctctttgccttggacttcttctcccgcgattttccccacttacttaccctcacctgtcaggctgacggggaggaaccactgcaccaccgagagaggctgggatgggcctgcttcctgtctttgggagaaaacgtcttgcttgggaaggggcctttgtcttgtcaaggttccaactggaaacccttaggacagggtccctgctgtgttccccaaaaggacttgacttgcaatttctacctagaaatacatggacaatacccccaggcctcagtctcccttctcccatgaggcacgaatgatctttctttcctttccttttttttttttttcttttctttttttttttttttgagacggagtctcgctctgtcacccaggctggagtgcaatggcgtgatctcggctcgctgcaacctccgcctcccgggttcaagtaattctgctgtctcagcctcctgcgtagctgggactacaggcacacgccacctcgcccggcccgatctttctaaaatacagttctgaatatgctgctcatccccacctgtcttcaacagctccccattaccctcaggacaatgtctgaactctccagcttcgcgtgagaagtccccttccatcccagagggtgggcttcagggcgcacagcatgagagcctctgtgcccccatcaccctcgtttccagtgaattagtgtcatgtcagcatcagctcagggcttcatcgtggggctctcagttccgattccccaggctgaattgggagtgagatgcctgcatgctgggttctgcacagctggcctcccgcggttgggtcaacattgctggcctggaagggaggagcgccctctagggagggacatggccccggtgcggctgcagctcaccagccccaggggcagaagagacccaaccacttcctattttttgaggctatgaatatagtacctgaaaaaatgccaagcactagattatttttttaaaaagcgtactttaaatgtttgtgttaatacacattaaaacatcgcacaaaaacgatgcatctaccgctccttgggaaataatctgaaaggtctaaaaataaaaaagccttctgtggaaaaaaaaaaaaaaaaaaaaaaaaaaaaaaaaaaaaaaaaaaaaaaaaaa

SEQ ID NO: 303 - DNA, 4654 bp, Homo sapiens
gaattcctgccactcttcctgcaacggcccaggagctcagagctccacatctgaccttctagtcatgaccaggaccagggcagcactcctcctgttcacagccttagcaacttctctaggtttcaacttggacacagaggagctgacagccttccgtgtggacagcgctgggtttggagacagcgtggtccagtatgccaactcctgggtggtggttggagccccccaaaagataacagctgccaaccaaacgggtggcctctaccagtgtggctacagcactggtgcctgtgagcccatcggcctgcaggtgcccccggaggccgtgaacatgtccctgggcctgtccctggcgtctaccaccagcccttcccagctgctggcctgcggccccaccgtgcaccacgagtgcgggaggaacatgtacctcaccggactctgcttcctcctgggccccacccagctcacccagaggctcccggtgtccaggcaggagtgcccaagacaggagcaggacattgtgttcctgatcgatggctcaggcagcatctcctcccgcaactttgccacgatgatgaacttcgtgagagctgtgataagccagttccagagacccagcacccagttttccctgatgcagttctccaacaaattccaaacacacttcactttcgaggaattcaggcgcacgtcaaaccccctcagcctgttggcttctgttcaccagctgcaagggtttacatacacggccaccgccatccaaaatgtcgtgcaccgattgttccatgcctcatatggggcccgtagggatgccaccaaaattctcattgtcatcactgatgggaagaaagaaggcgacagcctggattataaggatgtcatccccatggctgatgcagcaggcatcatccgctatgcaattggggttggattagcttttcaaaacagaaattcttggaaagaattaaatgacattgcatcgaagccctcccaggaacacatatttaaagtggaggactttgatgctctgaaagatattcaaaaccaactgaaggagaagatctttgccattgagggtacggagaccacaagcagtagctccttcgaattggagatggcacaggagggcttcagcgctgtgttcacacctgatggccccgttctgggggctgtggggagcttcacctggtctggaggtgccttcctgtaccccccaaatatgagccctaccttcatcaacatgtctcaggagaatgtggacatgagggactcttacctgggttactccaccgagctggccctctggaaaggggtgcagagcctggtcctgggggccccccgctaccagcacaccgggaaggctgtcatcttcacccaggtgtccaggcaatggaggatgaaggccgaagtcacggggactcagatcggctcctacttcggggcctccctctgctccgtggacgtagacaccgacggcagcaccgacctggtcctcatcggggccccccattactacgagcagacccgagggggccaggtgtctgtgtgtcccttgcccagggggtggagaaggtggtggtgtgatgctgttctctacggggagcagggccacccctggggtcgctttggggcggctctgacagtgctgggggatgtgaatggggacaagctgacagacgtggtcatcggggccccaggagaggaggagaaccggggtgctgtctacctgtttcacggagtcttgggacccagcatcagcccctcccacagccagcggatcgcgggctcccagctctcctccaggctgcagtattttgggcaggcactgagcgggggtcaagacctcacccaggatggactggtggacctggctgtgggggcccggggccaggtgctcctgctcaggaccagacctgtgctctgggtgggggtgagcatgcagttcatacctgccgagatccccaggtctgcgtttgagtgtcgggagcaggtggtctctgagcagaccctggtacagtccaacatctgcctttacattgacaaacgttctaagaacctgcttgggagccgtgacctccaaagctctgtgaccttggacctggccctcgaccctggccgcctgagtccccgtgccaccttccaggaaacaaagaaccggagtctgagccgagtccgagtcctcgggctgaaggcacactgtgaaaacttcaacctgctgctcccgagctgcgtggaggactctgtgacccccattaccttgcgtctgaacttcacgctggtgggcaagcccctccttgccttcagaaacctgcggcctatgctggccgcactggctcagagatacttcacggcctccctaccctttgagaagaactgtggagccgaccatatctgccaggacaatctcggcatctccttcagcttcccaggcttgaagtccctgctggtggggagtaacctggagctgaacgcagaagtgatggtgtggaatgacggggaagactcctacggaaccaccatcaccttctcccaccccgcaggactgtcctaccgctacgtggcagagggccagaaacaagggcagctgcgttccctgcacctgacatgtgacagcgccccagttgggagccagggcacctggagcaccagctgcagaatcaaccacctcatcttccgtggcggcgcccagatcaccttcttggctacctttgacgtctcccccaaggctgtcctgggagaccggctgcttctgacagccaatgtgagcagtgagaacaacactcccaggaccagcaagaccaccttccagctggagctcccggtgaagtatgctgtctacactgtggttagcagccacgaacaattcaccaaatacctcaacttctcagagtctgaggagaaggaaagccatgtggccatgcacagataccaggtcaataacctgggacagagggacctgcctgtcagcatcaacttctgggtgcctgtggagctgaaccaggaggctgtgtggatggatgtggaggtctcccacccccagaacccatcccttcggtgctcctcagagaaaatcgcacccccagcatctgacttcctggcgcacattcagaagaatcccgtgctggactgctccattgctggctgcctgcggttccgctgtgacgtcccctccttcagcgtccaggaggagctggatttcaccctgaagggcaacctcagctttggctgggtccgccagatattgcagaagaaggtgtcggtcgtgagtgtggctgaaattacgttcgacacatccgtgtactcccagcttccaggacaggaggcatttatgagagctcagacgacaacggtgctggagaagtacaaggtccacaaccccacccccctcatcgtaggcagctccattgggggtctgttgctgctggcactcatcacagcggtactgtacaaagttggcttcttcaagcgtcagtacaaggaaatgatggaggaggcaaatggacaaattgccccagaaaacgggacacagacccccagcccgcccagtgagaaatgatccctctttgccttggacttcttctcccgcgattttccccacttacttaccctcacctgtcaggctgacggggaggaaccactgcaccaccgagagaggctgggatgggcctgcttcctgtctttgggagaaaacgtcttgcttgggaaggggcctttgtcttgtcaaggttccaactggaaacccttaggacagggtccctgctgtgttccccaaaaggacttgacttgcaatttctacctagaaatacatggacaatacccccaggcctcagtctcccttctcccatgaggcacgaatgatctttctttcctttccttttttttttttttcttttctttttttttttttttgagacggagtctcgctctgtcacccaggctggagtgcaatggcgtgatctcggctcgctgcaacctccgcctcccgggttcaagtaattctgctgtctcagcctcctgcgtagctgggactacaggcacacgccacctcgcccggcccgatctttctaaaatacagttctgaatatgctgctcatccccacctgtcttcaacagctccccattaccctcaggacaatgtctgaactctccagcttcgcgtgagaagtccccttccatcccagagggtgggcttcagggcgcacagcatgagagcctctgtgcccccatcaccctcgtttccagtgaattagtgtcatgtcagcatcagctcagggcttcatcgtggggctctcagttccgattccccaggctgaattgggagtgagatgcctgcatgctgggttctgcacagctggcctcccgcggttgggtcaacattgctggcctggaagggaggagcgccctctagggagggacatggccccggtgcggctgcagctcaccagccccaggggcagaagagacccaaccacttcctattttttgaggctatgaatatagtacctgaaaaaatgccaagcactagattatttttttaaaaagcgtactttaaatgtttgtgttaatacacattaaaacatcgcacaaaaacgatgcatctaccgctccttgggaaataatctgaaaggtctaaaaataaaaaagccttctgtgg

SEQ ID NO: 304 - DNA, 4704 bp, Homo sapiens
gaattcctgccactcttcctgcaacggcccaggagctcagagctccacatctgaccttctagtcatgaccaggaccagggcagcactcctcctgttcacagccttagcaacttctctaggtttcaacttggacacagaggagctgacagccttccgtgtggacagcgctgggtttggagacagcgtggtccagtatgccaactcctgggtggtggttggagccccccaaaagataacagctgccaaccaaacgggtggcctctaccagtgtggctacagcactggtgcctgtgagcccatcggcctgcaggtgcccccggaggccgtgaacatgtccctgggcctgtccctggcgtctaccaccagcccttcccagctgctggcctgcggccccaccgtgcaccacgagtgcgggaggaacatgtacctcaccggactctgcttcctcctgggccccacccagctcacccagaggctcccggtgtccaggcaggagtgcccaagacaggagcaggacattgtgttcctgatcgatggctcaggcagcatctcctcccgcaactttgccacgatgatgaacttcgtgagagctgtgataagccagttccagagacccagcacccagttttccctgatgcagttctccaacaaattccaaacacacttcactttcgaggaattcaggcgcacgtcaaaccccctcagcctgttggcttctgttcaccagctgcaagggtttacatacacggccaccgccatccaaaatgtcgtgcaccgattgttccatgcctcatatggggcccgtagggatgccaccaaaattctcattgtcatcactgatgggaagaaagaaggcgacagcctggattataaggatgtcatccccatggctgatgcagcaggcatcatccgctatgcaattggggttggattagcttttcaaaacagaaattcttggaaagaattaaatgacattgcatcgaagccctcccaggaacacatatttaaagtggaggactttgatgctctgaaagatattcaaaaccaactgaaggagaagatctttgccattgagggtacggagaccacaagcagtagctccttcgaattggagatggcacaggagggcttcagcgctgtgttcacacctgatggccccgttctgggggctgtggggagcttcacctggtctggaggtgccttcctgtaccccccaaatatgagccctaccttcatcaacatgtctcaggagaatgtggacatgagggactcttacctgggttactccaccgagctggccctctggaaaggggtgcagagcctggtcctgggggccccccgctaccagcacaccgggaaggctgtcatcttcacccaggtgtccaggcaatggaggatgaaggccgaagtcacggggactcagatcggctcctacttcggggcctccctctgctccgtggacgtagacaccgacggcagcaccgacctggtcctcatcggggccccccattactacgagcagacccgagggggccaggtgtctgtgtgtcccttgcccagggggtggagaaggtggtggtgtgatgctgttctctacggggagcagggccacccctggggtcgctttggggcggctctgacagtgctgggggatgtgaatggggacaagctgacagacgtggtcatcggggccccaggagaggaggagaaccggggtgctgtctacctgtttcacggagtcttgggacccagcatcagcccctcccacagccagcggatcgcgggctcccagctctcctccaggctgcagtattttgggcaggcactgagcgggggtcaagacctcacccaggatggactggtggacctggctgtgggggcccggggccaggtgctcctgctcaggaccagacctgtgctctgggtgggggtgagcatgcagttcatacctgccgagatccccaggtctgcgtttgagtgtcgggagcaggtggtctctgagcagaccctggtacagtccaacatctgcctttacattgacaaacgttctaagaacctgcttgggagccgtgacctccaaagctctgtgaccttggacctggccctcgaccctggccgcctgagtccccgtgccaccttccaggaaacaaagaaccggagtctgagccgagtccgagtcctcgggctgaaggcacactgtgaaaacttcaacctgctgctcccgagctgcgtggaggactctgtgacccccattaccttgcgtctgaacttcacgctggtgggcaagcccctccttgccttcagaaacctgcggcctatgctggccgcactggctcagagatacttcacggcctccctaccctttgagaagaactgtggagccgaccatatctgccaggacaatctcggcatctccttcagcttcccaggcttgaagtccctgctggtggggagtaacctggagctgaacgcagaagtgatggtgtggaatgacggggaagactcctacggaaccaccatcaccttctcccaccccgcaggactgtcctaccgctacgtggcagagggccagaaacaagggcagctgcgttccctgcacctgacatgtgacagcgccccagttgggagccagggcacctggagcaccagctgcagaatcaaccacctcatcttccgtggcggcgcccagatcaccttcttggctacctttgacgtctcccccaaggctgtcctgggagaccggctgcttctgacagccaatgtgagcagtgagaacaacactcccaggaccagcaagaccaccttccagctggagctcccggtgaagtatgctgtctacactgtggttagcagccacgaacaattcaccaaatacctcaacttctcagagtctgaggagaaggaaagccatgtggccatgcacagataccaggtcaataacctgggacagagggacctgcctgtcagcatcaacttctgggtgcctgtggagctgaaccaggaggctgtgtggatggatgtggaggtctcccacccccagaacccatcccttcggtgctcctcagagaaaatcgcacccccagcatctgacttcctggcgcacattcagaagaatcccgtgctggactgctccattgctggctgcctgcggttccgctgtgacgtcccctccttcagcgtccaggaggagctggatttcaccctgaagggcaacctcagctttggctgggtccgccagatattgcagaagaaggtgtcggtcgtgagtgtggctgaaattacgttcgacacatccgtgtactcccagcttccaggacaggaggcatttatgagagctcagacgacaacggtgctggagaagtacaaggtccacaaccccacccccctcatcgtaggcagctccattgggggtctgttgctgctggcactcatcacagcggtactgtacaaagttggcttcttcaagcgtcagtacaaggaaatgatggaggaggcaaatggacaaattgccccagaaaacgggacacagacccccagcccgcccagtgagaaatgatccctctttgccttggacttcttctcccgcgattttccccacttacttaccctcacctgtcaggctgacggggaggaaccactgcaccaccgagagaggctgggatgggcctgcttcctgtctttgggagaaaacgtcttgcttgggaaggggcctttgtcttgtcaaggttccaactggaaacccttaggacagggtccctgctgtgttccccaaaaggacttgacttgcaatttctacctagaaatacatggacaatacccccaggcctcagtctcccttctcccatgaggcacgaatgatctttctttcctttccttttttttttttttcttttctttttttttttttttgagacggagtctcgctctgtcacccaggctggagtgcaatggcgtgatctcggctcgctgcaacctccgcctcccgggttcaagtaattctgctgtctcagcctcctgcgtagctgggactacaggcacacgccacctcgcccggcccgatctttctaaaatacagttctgaatatgctgctcatccccacctgtcttcaacagctccccattaccctcaggacaatgtctgaactctccagcttcgcgtgagaagtccccttccatcccagagggtgggcttcagggcgcacagcatgagagcctctgtgcccccatcaccctcgtttccagtgaattagtgtcatgtcagcatcagctcagggcttcatcgtggggctctcagttccgattccccaggctgaattgggagtgagatgcctgcatgctgggttctgcacagctggcctcccgcggttgggtcaacattgctggcctggaagggaggagcgccctctagggagggacatggccccggtgcggctgcagctcaccagccccaggggcagaagagacccaaccacttcctattttttgaggctatgaatatagtacctgaaaaaatgccaagcactagattatttttttaaaaagcgtactttaaatgtttgtgttaatacacattaaaacatcgcacaaaaacgatgcatctaccgctccttgggaaataatctgaaaggtctaaaaataaaaaagccttctgtggaaaaaaaaaaaaaaaaaaaaaaaaaaaaaaaaaaaaaaaaaaaaaaaaaa

SEQ ID NO: 305 - DNA, 4382 bp, Homo sapiens
ctccaacaaattccaaacacacttcactttcgaggaattcaggcgcagctcaaaccccctcagcctgttggcttctgttcaccagctgcaagggtttacatacacggccaccgccatccaaaatgtcgtgcaccgattgttccatgcctcatatggggcccgtagggatgccgccaaaattctcattgtcatcactgatgggaagaaagaaggcgacagcctggattataaggatgtcatccccatggctgatgcagcaggcatcatccgctatgcaattggggtagggcgtgggatggcttcccacttctcccacggcttcctctcagggcaactcccctttctgtgtatgttcttttctctttgagacagggtcttgctctatcacccaggaagtggtgcaatcctagctcactgcagccttgaactcctgggctccagtgatcctcccaccccagcctccccagtagctgggaccacaggtgtgtgccatcaagcctggctattttctttttggttgagatggggtcttgctatgttgcccaggctggtctcaaattcctggccttaagcaattctgccaccttggtctcccaaagcacagggattacaggcgtgaaccaccgccaacaacatccctttcaaggatagaaacaccagctctctcggctcttactgccttaaggatgaaaactctgccccagactggagaccatgatcctttctcctaaactccctgatgctgtccgggcttcgtgtttctcctgtgtccaccgggtgtgatcatgttgatcttgtggggttattggaagatgttgcacccagtgcacacaggcacatttgatttattatttttactgagttgatcttttctggggacaggttggattagcttttcaaaacagaaattcttggaaagaattaaatgacattgcatcgaagccctcccaggaacacatatttaaagtggaggactttgatgctctgaaagatattcaaaaccaactgaaggagaagatctttgccattgagggtacggagaccacaagcagtagctccttcgaattggagatggcacaggagggcttcagcgctgtgttcacacctgatggccccgttctgggggctgtggggagcttcacctggtctggaggtgccttcctgtaccccccaaatatgagccctaccttcatcaacatgtctcaggagaatgtggacatgagggactcttacctgggttactccaccgagctggccctctggaaaggggtgcagagcctggtcctgggggccccccgctaccagcacaccgggaaggctgtcatcttcacccaggtgtccaggcaatggaggatgaaggccgaagtcacggggactcagatcggctcctacttcggggcctccctctgctccgtggacgtagacagcgacggcagcaccgacctggtcctcatcggggccccccattactacgagcagacccgagggggccaggtgtctgtgtgtcccttgcccagggggtggagaaggtggtggtgtgatgctgttctctacggggagcagggccacccctggggtcgctttggggcggctctgacagtgctgggggatgtgaatggggacaagctgacagacgtggtcatcggggccccaggagaggaggagaaccggggtgctgtctacctgtttcacggagtcttgggacccagcatcagcccctcccacagccagagtctcgctctgtcacccagactggagcacagtggtgcaatctccgctcactgcaacctctgcctcccgggttcaagtgattctcctgcctcagcctcctgagcagcttggattgcagcggatcgcgggctcccagctctcctccaggctgcagtattttgggcaggcactgagcgggggtcaagacctcacccaggatggactggtggacctggctgtgggggcccggggccaggtgctcctgctcaggaccagacctgtgctctgggtgggggtgagcatgcagttcatacctgccgagatccccaggtctgcgtttgagtgtcgggagcaggtggtctctgagcagaccctggtacagtccaacatctgcctttacattgacaaacgttctaagaacctgcttgggagccgtgacctccaaagctctgtgaccttggacctggccctcgaccctggccgcctgagtccccgtgccaccttccaggaaacaaagaaccggagtctgagccgagtccgagtcctcgggctgaaggcacactgtgaaaacttcaacctgctgctcccgctaccctttgagaagaactgtggagccgaccatatctgccaggacaatctcggcatctccttcagcttcccaggaaacaagggcagctgcgttccctgcacctgacatgtgacagcgccccagttgggagccagggcacctggagcaccagctgcagaatcaaccacctcatcttccgtggcggcgcccagatcaccttcttggctacctttgacgtctcccccaaggctgtcctgggagaccggctgcttctgacagccaatgtgagcagtgagaacaacactcccaggaccagcaagaccaccttccagctggagctcccggtgaagtatgctgtctacactgtggttagcagccacgaacaattcaccaaatacctcaacttctcagagtctgaggagaaggaaagccatgtggccatgcacagataccaggtcaataacctgggacagagggacctgcctgtcagcatcaacttctgggtgcctgtggagctgaaccaggaggctgtgtggatggatgtggaggtctcccacccccagaacccatcccttcggtgctcctcagagaaaatcgcacccccagcatctgacttcctggcgcacattcagaagaatcccgtgctggactgctccattgctggctgcctgcggttccgctgtgacgtcccctccttcagcgtccaggaggagctggatttcaccctgaagggcaacctcagctttggctgggtccgccagatattgcagaagaaggtgtcggtcgtgagtgtggctgaaattacgttcgacacatccgtgtactcccagcttccaggacaggaggcatttatgagagctcagacgacaacggtgctggagaagtacaaggtccacaaccccacccccctcatcgtaggcagctccattgggggtctgttgctgctggcactcatcacagcggtactgtacaaagttggcttcttcaagcgtcagtacaaggaaatgatggaggaggcaaatggacaaattgccccagaaaacgggacacagacccccagcccgcccagtgagaaatgatcccctctttgccttggacttcttctcccccgcgagttttccccacttacttaccctcacctgtcaggcctgacggggaggaaccactgcaccaccgagagaggctgggatgggcctgcttcctgtctttgggagaaaacgtcttgcttgggaaggggcctttgtcttgtcaaggttccaactggaaacccttaggacagggtccctgctgtgttccccaaaggacttgacttgcaatttctacctagaaatacatggacaatacccccaggcctcagtctcccttctcccatgaggcacgaatgatctttcttttctttcttttttttttttttcttttctttttttttttttttgggacggagtctcgctctgtcacccaggctggagtgcaatggcgtgatctcggctcactgcaacctccgcctcccgggttcaagtaattctgctgtctcagcctcctgagtagctgggactacaggcacacgccacctcgcccggcccgatctttctaaaatacagttctgaatatgctgctcatccccacctgtcttcaacagctccccattaccctcaggacaatgtctgaactctccagcttcgcgtgagaagtccccttccatcccagagggtgggcttcagggcgcacagcatgagaggctctgtgcccccatcaccctcgtttccagtgaattagtgtcatgtcagcatcagctcagggcttcatcgtggggctctcagttccgatttcccaggctgaattgggagtgagatgcctgcatgctgggttctgcacagctggcctcccgcgttgggcaacattgctggctggaagggaggagcgccctctagggagggacatggccccggtgcggctgcagctcacccagccccaggggcagaagagacccaaccacttctattttttgaggctatgaatatagtacctggaaaaatgccaagacatgattatttttttaaaaagcgtactttaaatgtttgtgttaataaattaaaacatgcac

SEQ ID NO: 306 - DNA, 4042 bp, Homo sapiens
ggagctcagagctccacatctgaccttctagtcatgaccaggaccagggcagcactcctcctgttcacagccttagcaacttctctaggtttcaacttggacacagaggagctgacagccttccgtgtggacagcgctgggtttggagacagcgtggtccagtatgccaactcctgggtggtggttggagccccccaaaagataacagctgccaaccaaacgggtggcctctaccagtgtggctacagcactggtgcctgtgagcccatcggcctgcaggtgcccccggaggccgtgaacatgtccctgggcctgtccctggcgtctaccaccagcccttcccagctgctggcctgcggccccaccgtgcaccacgagtgcgggaggaacatgtacctcaccggactctgcttcctcctgggccccacccagctcacccagaggctcccggtgtccaggcaggagtgcccaagacaggagcaggacattgtgttcctgatcgatggctcaggcagcatctcctcccgcaactttgccacgatgatgaacttcgtgagagctgtgataagccagttccagagacccagcacccagttttccctgatgcagttctccaacaaattccaaacacacttcactttcgaggaattcaggcgcagctcaaaccccctcagcctgttggcttctgttcaccagctgcaagggtttacatacacggccaccgccatccaaaatgtcgtgcaccgattgttccatgcctcatatggggcccgtagggatgccgccaaaattctcattgtcatcactgatgggaagaaagaaggcgacagcctggattataaggatgtcatccccatggctgatgcagcaggcatcatccgctatgcaattggggttggattagcttttcaaaacagaaattcttggaaagaattaaatgacattgcatcgaagccctcccaggaacacatatttaaagtggaggactttgatgctctgaaagatattcaaaaccaactgaaggagaagatctttgccattgagggtacggagaccacaagcagtagctccttcgaattggagatggcacaggagggcttcagcgctgtgttcacacctgatggccccgttctgggggctgtggggagcttcacctggtctggaggtgccttcctgtaccccccaaatatgagccctaccttcatcaacatgtctcaggagaatgtggacatgagggactcttacctgggttactccaccgagctggccctctggaaaggggtgcagagcctggtcctgggggccccccgctaccagcacaccgggaaggctgtcatcttcacccaggtgtccaggcaatggaggatgaaggccgaagtcacggggactcagatcggctcctacttcggggcctccctctgctccgtggacgtagacagcgacggcagcaccgacctggtcctcatcggggccccccattactacgagcagacccgagggggccaggtgtctgtgtgtcccttgcccagggggtggagaaggtggtggtgtgatgctgttctctacggggagcagggccacccctggggtcgctttggggcggctctgacagtgctgggggatgtgaatggggacaagctgacagacgtggtcatcggggccccaggagagaaggagaaccggggtgctgtctacctgtttcacggagtcttgggacccagcatcagcccctcccacagccagcggatcgcgggctcccagctctcctccaggctgcagtattttgggcaggcactgagcgggggtcaagacctcacccaggatggactggtggacctggctgtgggggcccggggccaggtgctcctgctcaggaccagacctgtgctctgggtgggggtgagcatgcagttcatacctgccgagatccccaggtctgcgtttgagtgtcgggagcaggtggtctctgagcagaccctggtacagtccaacatctgcctttacattgacaaacgttctaagaacctgcttgggagccgtgacctccaaagctctgtgaccttggacctggccctcgaccctggccgcctgagtccccgtgccaccttccaggaaacaaagaaccggagtctgagccgagtccgagtcctcgggctgaaggcacactgtgaaaacttcaacctgctgctcccgagctgcgtggaggactctgtgacccccattaccttgcgtctgaacttcacgctggtgggcaagcccctccttgccttcagaaacctgcggcctatgctggccgccgatgctcagagatacttcacggcctccctaccctttgagaagaactgtggagccgaccatatctgccaggacaatctcggcatctccttcagcttcccaggcttgaagtccctgctggtggggagtaacctggagctgaacgcagaagtgatggtgtggaatgacggggaagactcctacggaaccaccgtcaccttctcccaccccgcaggactgtcctaccgctacgtggcagagggccagaaacaagggcagctgcgttccctgcacctgacatgtgacagcgccccagttgggagccagggcacctggagcaccagctgcagaatcaaccacctcatcttccgtggcggcgcccagatcaccttcttggctacctttgacgtctcccccaaggctgtcctgggagaccggctgcttctgacagccaatgtgagcagtgagaacaacactcccaggaccagcaagaccaccttccagctggagctcccggtgaagtatgctgtctacactgtggttagcagccacgaacaattcaccaaatacctcaacttctcagagtctgaggagaaggaaagccatgtggccatgcacagataccaggtcaataacctgggacagagggacctgcctgtcagcatcaacttctgggtgcctgtggagctgaaccaggaggctgtgtggatggatgtggaggtctcccacccccagaacccatcccttcggtgctcctcagagaaaatcgcacccccagcatctgacttcctggcgcacattcagaagaatcccgtgctggactgctccattgctggctgcctgcggttccgctgtgacgtcccctccttcagcgtccaggaggagctggatttcaccctgaagggcaacctcagctttggctgggtccgccagatattgcagaagaaggtgtcggtcgtgagtgtggctgaaattacgttcgacacatccgtgtactcccagcttccaggacaggaggcatttatgagagctcagacgacaacggtgctggagaagtacaaggtccacaaccccacccccctcatcgtaggcagctccattgggggtctgttgctgctggcactcatcacagcggtactgtacaaagttggcttcttcaagcgtcagtacaaggaaatgatggaggaggcaaatggacaaattgccccagaaaacgggacacagacccccagcccgcccactccccattaccctcaggacaatgtctgaactctccagcttcgcgtgagaagtccccttccatcccagagggtgggcttcagggcgcacagcatgagaggctctgtgcccccatcaccctcgtttccagtgaattagtgtcatgtcagcatcagctcagggcttcatcgtggggctctcagttccgatttcccaggctgaattgggagtgagatgcctgcatgctgggttctgcacagctggcctcccgcgttgggcaacattgctggctggaagggaggagcgccctctagggagggacatggccccggtgcggctgcagctcacccagccccaggggcagaagagacccaaccacttctattttttgaggctatgaatatagtacctggaaaaatgccaagacatgattatttttttaaaaagcgtactttaaatgtttgtgttaataaattaaaacatgcacaaaaagatgcaaaaaaaaaaaaaaaaaaaaaaaaaaaaaaaaaaaaaaaaaaaaaaaaaaaaa

SEQ ID NO: 307 - DNA, 1540 bp, Homo sapiens
cccgttcctgcaccagccccgcaccctccccagaaggctggtcgccctggtctgagtggagtaagtgcactgacgacggagcccagagccgaagccggcactgtgaggagctcctcccagggtccagcgcctgtgctggaaacagcagccagagccgcccctgcccctacagcgagattcccgtcatcctgccagcctccagcatggaggaggccaccggctgtgcagggttcaatctcatccacttggtggccacgggcatctcctgcttcttgggctctgggctcctgaccctagcagtgtacctgtcttgccagcactgccagcgtcagtcccaggagtccacactggtccatcctgccacccccaaccatttgcactacaagggcggaggcaccccgaagaatgaaaagtacacacccatggaattcaagaccctgaacaagaataacttgatccctgatgacagagccaacttctacccattgcagcagaccaatgtgtacacgactacttactacccaagccccctgaacaaacacagcttccggcccgaggcctcacctggacaacggtgcttccccaacagctgataccgccgtcctggggacttgggcttcttgccttcataaggcacagagcagatggagatgggacagtggagccagtttggttttctccctctgcactaggccaagaacttgctgccttgcctgtggggggtcccatccggcttcagagagctctggctggcattgaccatgggggaaagggctggtttcaggctgacatatggccgcaggtccagttcagcccaggtctctcatggttatcttccaacccactgtcacgctgacactatgctgccatgcctgggctgtggacctactgggcatttgaggaattggagaatggagatggcaagagggcgggcttttaagtttgggttggagacaacttcctgtggcccccacaagctgagtctggccttctccagctggccccaaaaaaggcctttgctacatcctgattatctctgaaagtaatcaatcaagtggctccagtagctctggattttctgccagggctgggccattgtggtgctgccccagtatgacatgggaccaaggccagcgcaggttatccacctctgcctggaagtctatactctacccagggcatccctctggtcagaggcagtgagtactgggaactggaggctgacctgtgcttagaagtcctttaatctgggctggtacaggcctcagccttgccctcaatgcacgaaaggtggcccaggagagaggatcaatgccataggaggcagaagtctggcctctgtgcctctatggagactatctttcagttgctgctcaacagagttgttggctgagacctgcttgggagtctctgctggcccttcatctgttcaggaacacacacacacacacactcacacacgcacacacaatcacaatttgctacagcaacaaaaaagacattgggctgtggcattattaattaaagatgatatccagtc

SEQ ID NO: 308 - DNA, 4559 bp, Homo sapiens
gcggccgccccattcccagaccggccgccagcccatctggttagctcccgccgctccgcgccgcccgggagtcgggagccgcggggaaccgggcacctgcacccgcctctgggagtgagtggttccagctggtgcctggcctgtgtctcttggatgccctgtggcttcagtccgtctcctgttgcccaccacctcgtccctgggccgcctgataccccagcccaacagctaaggtgtggatggacagtagggggctggcttctctcactggtcaggggtcttctcccctgtctgcctcccggagctaggactgcagaggggcctatcatggtgcttgcaggccccctggctgtctcgctgttgctgcccagcctcacactgctggtgtcccacctctccagctcccaggatgtctccagtgagcccagcagtgagcagcagctgtgcgcccttagcaagcaccccaccgtggcctttgaagacctgcagccgtgggtctctaacttcacctaccctggagcccgggatttctcccagctggctttggacccctccgggaaccagctcatcgtgggagccaggaactacctcttcagactcagccttgccaatgtctctcttcttcaggccacagagtgggcctccagtgaggacacgcgccgctcctgccaaagcaaagggaagactgaggaggagtgtcagaactacgtgcgagtcctgatcgtcgccggccggaaggtgttcatgtgtggaaccaatgccttttcccccatgtgcaccagcagacaggtggggaacctcagccggactactgagaagatcaatggtgtggcccgctgcccctatgacccacgccacaactccacagctgtcatctcctcccagggggagctctatgcagccacggtcatcgacttctcaggtcgggaccctgccatctaccgcagcctgggcagtgggccaccgcttcgcactgcccaatataactccaagtggcttaatgagccaaacttcgtggcagcctatgatattgggctgtttgcatacttcttcctgcgggagaacgcagtggagcacgactgtggacgcaccgtgtactctcgcgtggcccgcgtgtgcaagaatgacgtggggggccgattcctgctggaggacacatggaccacattcatgaaggcccggctcaactgctcccgcccgggcgaggtccccttctactataacgagctgcagagtgccttccacttgccagagcaggacctcatctatggagttttcacaaccaacgtaaacagcatcgcggcttctgctgtctgcgccttcaacctcagtgctatctcccaggctttcaatggcccatttcgctaccaggagaaccccagggctgcctggctccccatagccaaccccatccccaatttccagtgtggcaccctgcctgagaccggtcccaacgagaacctgacggagcgcagcctgcaggacgcgcagcgcctcttcctgatgagcgaggccgtgcagccggtgacacccgagccctgtgtcacccaggacagcgtgcgcttctcacacctcgtggtggacctggtgcaggctaaagacacgctctaccatgtactctacattggcaccgagtcgggcaccatcctgaaggcgctgtccacggcgagccgcagcctccacggctgctacctggaggagctgcacgtgctgccccccgggcgccgcgagcccctgcgcagcctgcgcatcctgcacagcgcccgcgcgctcttcgtggggctgagagacggcgtcctgcgggtcccactggagaggtgcgccgcctaccgcagccagggggcatgcctgggggcccgggacccgtactgtggctgggacgggaagcagcaacgttgcagcacactcgaggacagctccaacatgagcctctggacccagaacatcaccgcctgtcctgtgcggaatgtgacacgggatgggggcttcggcccatggtcaccatggcaaccatgtgagcacttggatggggacaactcaggctcttgcctgtgtcgagctcgatcctgtgattcccctcgaccccgctgtgggggccttgactgcctggggccagccatccacatcgccaactgctccaggaatggggcgtggaccccgtggtcatcgtgggcgctgtgcagcacgtcctgtggcatcggcttccaggtccgccagcgaagttgcagcaaccctgctccccgccacgggggccgcatctgcgtgggcaagagccgggaggaacggttctgtaatgagaacacgccttgcccggtgcccatcttctgggcttcctggggctcctggagcaagtgcagcagcaactgtggagggggcatgcagtcgcggcgtcgggcctgcgagaacggcaactcctgcctgggctgcggcgtggagttcaagacgtgcaaccccgagggctgccccgaagtgcggcgcaacaccccctggacgccgtggctgcccgtgaacgtgacgcagggcggggcacggcaggagcagcggttccgcttcacctgccgcgcgccccttgcagacccgcacggcctgcagttcggcaggagaaggaccgagacgaggacctgtcccgcggacggctccggctcctgcgacaccgacgccctggtggaggacctcctgcgcagcgggagcacctccccgcacacggtgagcgggggctgggccgcctggggcccgtggtcgtcctgctcccgggactgcgagctgggcttccgcgtccgcaagagaacgtgcactaacccggagccccgcaacgggggcctgccctgcgtgggcgatgctgccgagtaccaggactgcaacccccaggcttgcccagttcggggtgcttggtcctgctggacctcatggtctccatgctcagcttcctgtggtgggggtcactatcaacgcacccgttcctgcaccagccccgcaccctccccaggtgaggacatctgtctcgggctgcacacggaggaggcactatgtgccacacaggcctgcccagaaggctggtcgccctggtctgagtggagtaagtgcactgacgacggagcccagagccgaagccggcactgtgaggagctcctcccagggtccagcgcctgtgctggaaacagcagccagagccgcccctgcccctacagcgagattcccgtcatcctgccagcctccagcatggaggaggccaccggctgtgcagggttcaatctcatccacttggtggccacgggcatctcctgcttcttgggctctgggctcctgaccctagcagtgtacctgtcttgccagcactgccagcgtcagtcccaggagtccacactggtccatcctgccacccccaaccatttgcactacaagggcggaggcaccccgaagaatgaaaagtacacacccatggaattcaagaccctgaacaagaataacttgatccctgatgacagagccaacttctacccattgcagcagaccaatgtgtacacgactacttactacccaagccccctgaacaaacacagcttccggcccgaggcctcacctggacaacggtgcttccccaacagctgataccgccgtcctggggacttgggcttcttgccttcataaggcacagagcagatggagatgggacagtggagccagtttggttttctccctctgcactaggccaagaacttgctgccttgcctgtggggggtcccatccggcttcagagagctctggctggcattgaccatgggggaaagggctggtttcaggctgacatatggccgcaggtccagttcagcccaggtctctcatggttatcttccaacccactgtcacgctgacactatgctgccatgcctgggctgtggacctactgggcatttgaggaactggagaatggagatggcaagagggcaggcttttaagtttgggttggagacaacttcctgtggcccccacaagctgagtctggccttctccagctggccccaaaaaaggcctttgctacatcctgattatctctgaaagtaatcaatcaagtggctccagtagctctggattttctgccagggctgggccattgtggtgctgccccagtatgacatgggaccaaggccagcgcaggttatccacctctgcctggaagtctatactctacccagggcatccctctggtcagaggcagtgagtactgggaactggaggctgacctgtgcttagaagtcctttaatctgggctggtacaggcctcagccttgccctcaatgcacgaaaggtggcccaggagagaggatcaatgccacaggaggcagaagtctggcctctgtgcctctatggagactatcttccagttgctgctcaacagagttgttggctgagacctgcttgggagtctctgctggcccttcatctgttcaggaacacacacacacacacactcacacacgcacacacaatcacaatttgctacagcaacaaaaaagacattgggctgtggcattattaattaaagatgatatccagtctcc

SEQ ID NO: 309 - DNA, 1383 bp, Homo sapiens
ggcacgaggctccagcatggaggaggccaccggctgtgcagggttcaatctcatccacttggtggccacgggcatctcctgcttcttgggctctgggctcctgaccctagcagtgtacctgtcttgccagcactgccagcgtcagtcccaggagtccacactggtccatcctgccacccccaaccatttgcactacaagggcggaggcaccccgaagaatgaaaagtacacacccatggaattcaagaccctgaacaagaataacttgatccctgatgacagagccaacttctacccattgcagcagaccaatgtgtacacgactacttactacccaagccccctgaacaaacacagcttccggcccgaggcctcacctggacaacggtgcttccccaacagctgataccgccgtcctggggacttgggcttcttgccttcataaggcacagagcagatggagatgggacagtggagccagtttggttttctccctctgcactaggccaagaacttgctgccttgcctgtggggggtcccatccggcttcagagagctctggctggcattgaccatgggggaaagggctggtttcaggctgacatatggccgcaggtccagttcagcccaggtctctcatggttatcttccaacccactgtcacgctgacactatgctgccatgcctgggctgtggacctactgggcatttgaggaattggagaatggagatggcaagagggcaggcttttaagtttgggttggagacaacttcctgtggcccccacaagctgagtctggccttctccagctggccccaaaaaaggcctttgctacatcctgattatctctgaaagtaatcaatcaagtggctccagtagctctggattttctgccagggctgggccattgtggtgctgccccagtatgacatgggaccaaggccagcgcaggttatccacctctgcctggaagtctatactctacccagggcatccctctggtcagaggcagtgagtactgggaactggaggctgacctgtgcttagaagtcctttaatctgggctggtacaggcctcagccttgccctcaatgcacgaaaggtggcccaggagagaggatcaatgccataggaggcagaagtctggcctctgtgcctctatggagactatcttccagttgctgctcaacagagttgttggctgagacctgcttgggagtctctgctggcccttcatctgttcaggaacacacacacacacacactcacacacgcacacacaatcacaatttgctacagcaacaaaaaagacattgggctgtggcattattaattaaagatgatatccagtcaaaaaaaaaaaaaaaaaaaaaaaaaaaaaa

SEQ ID NO: 310 - DNA, 3791 bp, Homo sapiens
agtgcttttgtctggtgctgggagtgaggctcagcagtgtgagggacaattggagatgctcgggggcaggctgccgcgttgtgtcctgcttttctgcggccagaccaagccgtctggagctgctggtcaggttttcttgctgacctcacctgaccacagtggcctgggtggactctacagggaaatgttgttttctccctgggagcagtagcagcagtcctggctcccctggactgagaactcctcatcagccccaggaagcccggaccccctttcagggatctggaaccggtgtgcctgtggccccaggtctgctcccaggcgtgggctgaagtcctgacttctgtcgctgggggcaaggagtgggagagcccagctgctgcctgggctttggcagacagcaggctgatggtgctggcttccccgagactgcttctcctgcctgctgtctgatttccctgcatggtgcccgcagctgagctgctacggtgagtggctccagctggtgcctggcctgtgtctcttggatgccctgtggcttcagtccgtctcctgttgcccaccacctcgtccctgggccgcctgataccccagcccaacagctaaggtgtggatggacagtagggggctggcttctctcactggtcaggggtcttctcccctgtctgcctcccggagctaggactgcagaggggcctatcatggtgcttgcaggccccctggctgtctcgctgttgctgcccagcctcacactgctggtgtcccacctctccagctcccaggatgtctccagtgagcccagcagtgagcagcagctgtgcgcccttagcaagcaccccaccgtggcctttgaagacctgcagccgtgggtctctaacttcacctaccctggagcccgggatttctcccagctggctttggacccctccgggaaccagctcatcgtgggagccaggaactacctcttcagactcagccttgccaatgtctctcttcttcaggccacagagtgggcctccagtgaggacacgcgccgctcctgccaaagcaaagggaagactgaggaggagtgtcagaactacgtgcgagtcctgatcgtcgccggccggaaggtgttcatgtgtggaaccaatgccttttcccccatgtgcaccagcagacaggtggggaacctcagccggactattgagaagatcaatggtgtggcccgctgcccctatgacccacgccacaactccacagctgtcatctcctcccagggggagctctatgcagccacggtcatcgacttctcaggtcgggaccctgccatctaccgcagcctgggcagtgggccaccgcttcgcactgcccaatataactccaagtggcttaatgagccaaacttcgtggcagcctatgatattgggctgtttgcatacttcttcctgcgggagaacgcagtggagcacgactgtggacgcaccgtgtactctcgcgtggcccgcgtgtgcaggaatgacgtggggggccgattcctgctggaggacacatggaccacattcatgaaggcccagctcaactgctcccgcccgggcgaggtccccttctactataacgagctgcagagtgccttccacttgccggagcaggacctcatctatggagttttcacaaccaacgtaaacagcatcgcggcttctgctgtctgcgccttcaacctcagtgctatctcccaggctttcaatggcccatttcgctaccaggagaaccccagggctgcctggctccccatagccaaccccatccccaatttccagtgtggcaccctgcctgagaccggtcccaacgagaacctgacggagcgcagcctgcaggacgcgcagcgcctcttcctgatgagcgaggccgtgcagccggtgacacccgagccctgtgtcacccaggacagcgtgcgcttctcacacctcgtggtggacctggtgcaggctaaagacacgctctaccatgtactctacattggcaccgagtcgggcaccatcctgaaggcgctgtccacggcgagccgcagcctccacggctgctacctggaggagctgcacgtgctgccccccgggcgccgcgagcccctgcgcagcctgcgcatcctgcacagcgcccgcgcgctcttcgtggggctgagagacggcgtcctgcgggtcccactggagaggtgcgccgcctaccgcagccagggggcatgcctgggggcccgggacccgtactgtggctgggacgggaagcagcaacgttgcagcacactcgaggacagctccaacatgagcctctggacccagaacatcaccgcctgtcctgtgcggaatgtgacacgggatgggggcttcggcccatggtcaccatggcaaccatgtgagcacttggatggggacaactcaggctcttgcctgtgtcgagctcgatcctgtgattcccctcgaccccgctgtgggggccttgactgcctggggccagccatccacatcgccaactgctccaggaatggggcgtggaccccgtggtcatcgtgggcgctgtgcagcacgtcctgtggcatcggcttccaggtccgccagcgaagttgcagcaaccctgctccccgccacgggggccgcatctgcgtgggcaagagccgggaggaacggttctgtaatgagaacacgccttgcccggtgcccatcttctgggcttcctggggctcctggagcaagtgcagcagcaactgtggagggggcatgcagtcgcggcgtcgggcctgcgagaacggcaactcctgcctgggctgcggcgtggagttcaagacgtgcaaccccgagggctgccccgaagtgcggcgcaacaccccctggacgccgtggctgcccgtgaacgtgacgcagggcggggcacggcaggagcagcggttccgcttcacctgccgcgcgccccttgcagacccgcacggcctgcagttcggcaggagaaggaccgagacgaggacctgtcccgcggacggctccggctcctgcgacaccgacgccctggtggaggtcctcctgcgcagcgggagcacctccccgcacacggtgagcgggggctgggccgcctggggcccgtggtcgtcctgctcccgggactgcgagctgggcttccgcgtccgcaagagaacgtgcactaacccggagccccgcaacgggggcctgccctgcgtgggcgatgctgccgagtaccaggactgcaacccccaggcttgcccagttcggggtgcttggtcctgctggacctcatggtctccatgctcagcttcctgtggtgggggtcactatcaacgcacccgttcctgcaccagccccgcaccctccccaggtgaggacatctgtctcgggctgcacacggaggaggcactatgtgccacacaggcctgcccagaaggctggtcgccctggtctgagtggagtaagtgcactgacgacggagcccagagccgaagccggcactgtgaggagctcctcccagggtccagcgcctgtgctggaaacagcagccagagccgcccctgcccctacagcgagattcccgtcatcctgccagcctccagcatggaggaggccaccgactgtgcagggttcaatctcatccacttggtggccacgggcatctcctgcttcttgggctctgggctcctgaccctagcagtgtacctgtcttgccagcactgccagcgtcagtcccaggagtccacactggtccatcctgccacccccaaccatttgcactacaagggcggaggcaccccg

SEQ ID NO: 311 - DNA, 2881 bp, Homo sapiens
acagaagtgctagaagccagtgctcgtgaactaaggagaaaaagaacagacaagggaacagcctggacatggcatcagagatccacatgacaggcccaatgtgcctcattgagaacactaatgggcgactgatggcgaatccagaagctctgaagatcctttctgccattacacagcctatggtggtggtggcaattgtgggcctctaccgcacaggcaaatcctacctgatgaacaagctggctggaaagaaaaagggcttctctctgggctccacggtgcagtctcacactaaaggaatctggatgtggtgtgtgccccaccccaagaagccaggccacatcctagttctgctggacaccgagggtctgggagatgtagagaagggtgacaaccagaatgactcctggatcttcgccctggccgtcctcctgagcagcaccttcgtgtacaatagcataggaaccatcaaccagcaggctatggaccaactgtactatgtgacagagctgacacatagaatccgatcaaaatcctcacctgatgagaatgagaatgaggttgaggattcagctgactttgtgagcttcttcccagactttgtgtggacactgagagatttctccctggacttggaagcagatggacaacccctcacaccagatgagtacctgacatactccctgaagctgaagaaaggtaccagtcaaaaagatgaaacttttaacctgcccagactctgtatccggaaattcttcccaaagaaaaaatgctttgtctttgatcggcccgttcaccgcaggaagcttgcccagctcgagaaactacaagatgaagagctggaccccgaatttgtgcaacaagtagcagacttctgttcctacatctttagtaattccaaaactaaaactctttcaggaggcatccaggtcaacgggcctcgtctagagagcctggtgctgacctacgtcaatgccatcagcagtggggatctgccgtgcatggagaacgcagtcctggccttggcccagatagagaactcagctgcagtgcaaaaggctattgcccactatgaacagcagatgggccagaaggtgcagctgcccacagaaagcctccaggagctgctggacctgcacagggacagtgagagagaggccattgaagtcttcatcaggagttccttcaaagatgtggaccatctatttcaaaaggagttagcggcccagctagaaaaaaagcgggatgacttttgtaaacagaatcaggaagcatcatcagatcgttgctcaggtttacttcaggtcattttcagtcctctagaagaagaagtgaaggcgggaatttattcgaaaccagggggctatcgtctctttgttcagaagctacaagacctgaagaaaaagtactatgaggaaccgaggaaggggatacaggctgaagagattctgcagacatacttgaaatccaaggagtctatgactgatgcaattctccagacagaccagactctcacagaaaaagaaaaggagattgaagtggaacgtgtgaaagctgagtctgcacaggcttcagcaaaaatgttgcaggaaatgcaaagaaagaatgagcagatgatggaacagaaggagaggagttatcaggaacacttgaaacaactgactgagaagatggagaacgacagggtccagttgctgaaagagcaagagaggaccctcgctcttaaacttcaggaacaggagcaactactaaaagagggatttcaaaaagaaagcagaataatgaaaaatgagatacaggatctccagacgaaaatgagacgacgaaaggcatgtaccataagctaaagaccagagccttcctgtcacccctaaccaaggcataattgaaacaattttagaatttggaacaagcgtcactacatttgataataattagatcttgcatcataacaccaaaagtttataaaggcatgtggtacaatgatcaaaatcatgttttttcttaaaaaaaaaaaaaagactgtaaattgtgcaacaaagatgcatttacctctgtatcaactcaggaaatctcataagctggtaccactcaggagaagtttattcttccagatgaccagcagtagacaaatggatactgagcagagtcttaggtaaaagtcttgggaaatatttgggcattggtctggccaagtctacaatgtcccaatatcaaggacaaccaccctagcttcttagtgaagacaatgtacagttatccattagatcaagactacacggtctatgagcaataatgtgatttctggacattgcccatgtataatcctcactgatgatttcaagctaaagcaaaccaccttatacagagatctagaatctctttatgttctccagaggaaggtggaagaaaccatgggcaggagtaggaattgagtgataaacaattgggctaatgaagaaaacttctcttattgttcagttcatccagattataacttcaatgggacactttagaccattagacaattgacactggattaaacaaattcacataatgccaaatacacaatgtatttatagcaacgtataatttgcaaagatggactttaaaagatgctgtgtaactaaactgaaataattcaattacttattatttagaatgttaaagcttatgatagtcttttctaattcttaacactcatacttgaaatctttccgagtttccccagaagagaatatgggattttttttgacatttttgacccatttaataatgctcttgtgtttacctagtatatgtagactttgtcttatgtgtcaaaagtcctaggaaagtggttgatgtttcttatagcaattaaaaattatttttgaactga

SEQ ID NO: 312 - DNA, 2881 bp, Homo sapiens; identical to SEQ ID NO: 311

SEQ ID NO: 313 - DNA, 2185 bp, Homo sapiens
ggcacgaggggagtcagtgatttgaacgaagtactttcagtttcatattactctaaatccattacaaatctgcttagcttctaaatatttcatcaatgaggaaatcccagccctacaacttcggaacagtgaaatattagtccagggatccagtgagagacacagaagtgctagaagccagtgctcgtgaactaaggagaaaaagaacagacaagggaacagcctggacatggcatcagagatccacatgacaggcccaatgtgcctcattgagaacactaatgggcgactgatggcgaatccagaagctctgaagatcctttctgccattacacagcctatggtggtggtggcaattgtgggcctctaccgcacaggcaaatcctacctgatgaacaagctggctggaaagaaaaagggcttctctctgggctccacggtgcagtctcacactaaaggaatctggatgtggtgtgtgccccaccccaagaagccaggccacatcctagttctgctggacaccgagggtctgggagatgtagagaagggtgacaaccagaatgactcctggatcttcgccctggccgtcctcctgagcagcaccttcgtgtacaatagcataggaaccatcaaccagcaggctatggaccaactgtactatgtgacagagctgacacatagaatccgatcaaaatcctcacctgatgagaatgagaatgaggttgaggattcagctgactttgtgagcttcttcccagactttgtgtggacactgagagatttctccctggacttggaagcagatggacaacccctcacaccagatgagtacctgacatactccctgaagctgaagaaaggtaccagtcaaaaagatgaaacttttaacctgcccagactctgtatccggaaattcttcccaaagaaaaaatgctttgtctttgatcggcccgttcaccgcaggaagcttgcccagctcgagaaactacaagatgaagagctggaccccgaatttgtgcaacaagtagcagacttctgttcctacatctttagtaattccaaaactaaaactctttcaggaggcatccaggtcaacgggcctcgtctagagagcctggtgctgacctacgtcaatgccatcagcagtggggatctgccgtgcatggagaacgcagtcctggccttggcccagatagagaactcagctgcagtgcaaaaggctattgcccactatgaacagcagatgggccagaaggtgcagctgcccacagaaagcctccaggagctgctggacctgcacagggacagtgagagagaggccattgaagtcttcatcaggagttccttcaaagatgtggaccatctatttcaaaaggagttagcggcccagctagaaaaaaagcgggatgacttttgtaaacagaatcaggaagcatcatcagatcgttgctcaggtttacttcaggtcattttcagtcctctagaagaagaagtgaaggcgggaatttattcgaaaccagggggctatcgtctctttgttcagaagctacaagacctgaagaaaaagtactatgaggaaccgaggaaggggatacaggctgaagagattctgcagacatacttgaaatccaaggagtctatgactgatgcaattctccagacagaccagactctcacagaaaaagaaaaggagattgaagtggaacgtgtgaaagctgagtctgcacaggcttcagcaaaaatgttgcaggaaatgcaaagaaagaatgagcagatgatggaacagaaggagaggagttatcaggaacacttgaaacaactgactgagaagatggagaacgacagggtccagttgctgaaagagcaagagaggaccctcgctcttaaacttcaggaacaggagcaactactaaaagagggatttcaaaaagaaagcagaataatgaaaaatgagatacaggatctccagacgaaaatgagacgacgaaaggcatgtaccataagctaaagaccagagccttcctgtcacccctaaccaaggcataattgaaacaattttagaatttggaacaagcgtcactacatttgataataattagatcttgcatcataacaccaaaagtttataaaggcatgtggtacaatgatcaaaatcatgttttttcttaaaaaaaaaaaaaaaaaa

SEQ ID NO: 314 - DNA, 3736 bp, Homo sapiens
atctgcacagctggggcccctgggaggagacgccatgatccccaccttcacggctctgctctgcctcgggctgagtctgggccccaggaccgacatgcaggcagggcccctccccaaacccaccctctgggctgagccaggctctgtgatcagctgggggaactctgtgaccatctggtgtcaggggaccctggaggctcgggagtaccgtctggataaagaggaaagcccagcaccctgggacagacagaacccactggagcccaagaacaaggccagattctccatcccatccatgacagaggactatgcagggagataccgctgttactatcgcagccctgtaggctggtcacagcccagtgaccccctggagctggtgatgacaggagcctacagtaaacccaccctttcagccctgccgagtcctcttgtgacctcaggaaagagcgtgaccctgctgtgtcagtcacggagcccaatggacactttccttctgatcaaggagcgggcagcccatcccctactgcatctgagatcagagcacggagctcagcagcaccaggctgaattccccatgagtcctgtgacctcagtgcacggggggacctacaggtgcttcagctcacacggcttctcccactacctgctgtcacaccccagtgaccccctggagctcatagtctcaggatccttggagggtcccaggccctcacccacaaggtccgtctcaacagctgcaggccctgaggaccagcccctcatgcctacagggtcagtcccccacagtggtctgagaaggcactgggaggtactgatcggggtcttggtggtctccatcctgcttctctccctcctcctcttcctcctcctccaacactggcgtcagggaaaacacaggacattggcccagagacaggctgatttccaacgtcctccaggggctgccgagccagagcccaaggacgggggcctacagaggaggtccagcccagctgctgacgtccagggagaaaacttctgtgctgccgtgaagaacacacagcctgaggacggggtggaaatggacactcggcagagcccacacgatgaagacccccaggcagtgacgtatgccaaggtgaaacactccagacctaggagagaaatggcctctcctccctccccactgtctggggaattcctggacacaaaggacagacaggcagaagaggacagacagatggacactgaggctgctgcatctgaagccccccaggatgtgacctacgcccggctgcacagctttaccctcagacagaaggcaactgagcctcctccatcccaggaaggggcctctccagctgagcccagtgtctatgccactctggccatccactaatccaggggggacccagaccccacaagccatggagactcaggaccccagaaggcatggaagctgcctccagtagacatcactgaaccccagccagcccagacccctgacacagaccactagaagattccgggaacgttgggagtcacctgattctgcaaagataaataatatccctgcattatcaaaataaagtagcagacctctcaattcacaatgagttaactgataaaacaaaacagaagtcagacaatgttttaaattgaatgatcatgtaaatattacacatcaaaccaatgacatgggaaaatgggagcttctaatgaggacaaacaaaaaatagagaaaaattaataaagtcaaaatgtttattcttgaaaacattaatgatacatgaatcttggccacaatgagaaaaataaaaatgaaaaaagagcaggcatccatttccatacaggaacaaaataggaggcagcactacagaccctacacacagctttacagaggtgaaagaaaactgtcagcaattctatgctgacataacagaaaatgtagatgagatagatgaaatacgaaaaattacagtttacttaatgaacataaggataaatagaaaaactgaatcatcatacataaacatatataaaatgcattgatcctgtaatcaaaaatgttcccacaaagtaaatgccacttcagcaaggtttgttggtggttttttcaaactcttatgcactcatgaaacacacagacacacacacacacaaacttgcataaattttccctgagaatattttgtatatatttacacaaatacatttgatcagactaggaacaagttgataccaaaacctgaaaaggaaactacagaatgggaaagtcatagaagatctctcacagaaatataaatcccttaacaaatattaacaagtaagattcatgtctctataaaatagacagtatatcatgaccacactggttttttgttatcctttgattttgtttatgaaaagcaaggatagcttaattttcaaaaactcaatcaatgtaattcagtattttaacaaaaggaatgaaaaattatcatctcaatagacaaagcttttgtctgagcaccttttcatatagctgctgaccatttgtatgtcttcttttgagaaatgcctgttcagctactttgcccatgtttcaagtagtttttggtttcttgctgttgctttgttttagttccttacatatttttgcatattaaccctttatcaggtatacagcttgcaactattttctcccatttctgagttgtctcttcattctgtttgcagaagctgtttagaagccacaccttttgtctatttttgcttttgttgcttgtgttttcagggccatatccaaaaaaaccttgcccggaccaacgtcttgaagcttttctcacacccatttttgtatatgggataagggttcaatttcattcttcttcatatgaatatccccaggatgtgtcatatgcccagctgcacagcttaccctcaaacagaaaataatgaagccttcttcctcccaggaaaggggacgttcagctgagccgagtgtgtatactgctctggccatccactagcccagggaggacccagacctccacactccatggagactcagttctcctaggaccatttattcaaaaggactgccctctcttgttcttggaaactttgttgaggatcaattcaccataaatatgtgtgtttccttctttgctttcatccctgttgcactgatcactatacctgtttctattccagttccatgatgtcttcctggctgtagctttgtaggatatttggggattccatagtgtgatatccccttcttccctttgctcaagattgttttggctatttggggtccttttgtagtcccattcaaattttaggattgtttttctatttctgtggaaaacgaccttggaattttgttaggaattgcattgagtctgcaggtatgaacttttttttaaagttccagggcacatgtacaggacctgcagctttgttacataggtaggcttgtgccatggtggtttgctgcacctatcaacccattacctagttattaagcccagcatgcattagctctttttcctgatgctctccctcccttcatcatccgccctcccactacaagccccagtgtgtgttgttcccctccctgtgtccatgtgttctcattgttatacgaacattttaacaatgttaattcttgcagaccatgaacataagctaccttcccatttatatgcgtcttgttcaatttcattcatcaatgttataaagattttagtgcagaaaaaaaaaaaaaaaa

SEQ ID NO: 315 - DNA, 1588 bp, Homo sapiens
catccatctgcacagctggggcccctgggaggagacgccatgatccccaccctcacggctctgctctgcctcgggctgagtctgggccccaggacccacatgcaggcagggcccctccccaaacccaccctctgggctgagccaggctctgtgatcagctgggggaactctgtgaccatctggtgtcaggggaccctggaggctcgggagtaccgtctggataaagaggaaagcccagcaccctgggacagacagaacccactggagcccaagaacaaggccagattctccatcccatccatgacagaggactatgcagggagataccgctgttactatcgcagccctgtaggctggtcacagcccagtgaccccctggagctggtgatgacaggagcctacagtaaacccaccctttcagccctgccgagtcctcttgtgacctcaggaaagagcgtgaccctgctgtgtcagtcacggagcccaatggacactttccttctgatcaaggagcgggcagcccatcccctactgcatctgagatcagagcacggagctcagcagcaccaggctgaattccccatgagtcctgtgacctcagtgcacggggggacctacaggtgcttcagctcacacggcttctcccactacctgctgtcacaccccagtgaccccctggagctcatagtctcaggatccttggaggatcccaggccctcacccacaaggtccgtctcaacagctgcaggccctgaggaccagcccctcatgcctacagggtcagtcccccacagtggtctgagaaggcactgggaggtactgatcggggtcttggtggtctccatcctgcttctctccctcctcctcttcctcctcctccaacactggcgtcagggaaaacacaggacattggcccagagacaggctgatttccaacgtcctccaggggctgccgagccagagcccaaggacgggggcctacagaggaggtccagcccagctgctgacgtccagggagaaaacttctgtgctgccgtgaagaacacacagcctgaggacggggtggaaatggacactcggagcccacacgatgaagacccccaggcagtgacgtatgccaaggtgaaacactccagacctaggagagaaatggcctctcctccctccccactgtctggggaattcctggacacaaaggacagacaggcagaagaggacagacagatggacactgaggctgctgcatctgaagccccccaggatgtgacctacgcccagctgcacagctttaccctcagacagaaggcaactgagcctcctccatcccaggaaggggcctctccagctgagcccagtgtctatgccactctggccatccactaatccaggggggacccagaccccacaagccatggagactcaggaccccagaaggcatggaagctgcctccagtagacatcactgaaccccagccagcccagacccctgacacagaccactagaagattccgggaacgttgggagtcacctgattctgcaaagataaataatatccctgcattatcaaaataaagtagcagacctctc

SEQ ID NO: 316 - DNA, 3736 bp, Homo sapiens; identical to SEQ ID NO: 314

SEQ ID NO: 317 - DNA, 1396 bp, Homo sapiens
atgatccccaccttcacggctctgctctgcctcgggctgagtctgggccccaggacccacatgcaggcagggcccctccccaaacccaccctctgggctgagccaggctctgtgatcagctgggggaactctgtgaccatctggtgtcaggggaccctggaggctcgggagtaccgtctggataaagaggaaagcccagcaccctgggacagacagaacccactggagcccaagaacaaggccagattctccatcccatccatgacagaggactatgcagggagataccgctgttactatcgcagccctgtaggctggtcacagcccagtgaccccctggagctggtgatgacaggagcctacagtaaacccaccctttcagccctgccgagtcctcttgtgacctcaggaaagagcgtgaccctgctgtgtcagtcacggagcccaatggacactttccttctgatcaaggagcgggcagcccatcccctactgcatctgagatcagagcacggagctcagcagcaccaggctgaattccccatgagtcctgtgacctcagtgcacggggggacctacaggtgcttcagctcacacggcttctcccactacctgctgtcacaccccagtgaccccctggagctcatagtctcaggatccttggagggtcccaggccctcacccacaaggtccgtctcaacagctgcaggccctgaggaccagcccctcatgcctacagggtcagtcccccacagtggtctgagaaggcactgggaggtactgatcggggtcttggtggtctccatcctgcttctctccctcctcctcttcctcctcctccaacactggcgtcagggaaaacacaggacattggcccagagacaggctgatttccaacgtcctccaggggctgccgagccagagcccaaggacgggggcctacagaggaggtccagcccagctgctgacgtccagggagaaaacttctgtgctgccgtgaagaacacacagcctgaggacggggtggaaatggacactcggagcccacacgatgaagacccccaggcagtgacgtatgccaaggtgaaacactccagacctaggagagaaatggcctctcctccctccccactgtctggggaattcctggacacaaaggacagacaggcagaagaggacagacagatggacactgaggctgctgcatctgaagccccccaggatgtgacctacgcccagctgcacagctttaccctcagacagaaggcaactgagcctcctccatcccaggaaggggcctctccagctgagcccagtgtctatgccactctggccatccactaatccaggggggacccagaccccacaagccatggagactcaggaccccagaagg

SEQ ID NO: 318 - DNA, 1603 bp, Homo sapiens
tgagatgagagctgccgacagttgggggtcaagggaggagacgccatgatccccaccttcacggctctgctctgcctcgggctgagtctgggccccaggacccacatgcaggcagggcccctccccaaacccaccctctgggctgagccaggctctgtgatcagctgggggaactctgtgaccatctggtgtcaggggaccctggaggctcgggagtaccgtctggataaagaggaaagcccagcaccctgggacagacagaacccactggagcccaagaacaaggccagattctccatcccatccatgacagaggactatgcagggagataccgctgttactatcgcagccctgtaggctggtcacagcccagtgaccccctggagctggtgatgacaggagcctacagtaaacccaccctttcagccctgccgagtcctcttgtgacctcaggaaagagcgtgaccctgctgtgtcagtcacggagcccaatggacactttccttctgatcaaggagcgggcagcccatcccctactgcatctgagatcagagcacggagctcagcagcaccaggctgaattccccatgagtcctgtgacctcagtgcacggggggacctacaggtgcttcagctcacacggcttctcccactacctgctgtcacaccccagtgaccccctggagctcatagtctcaggatccttggagggtcccaggccctcacccacaaggtccgtctcaacagctgcaggccctgaggaccagcccctcatgcctacagggtcagtcccccacagtggtctgagaaggcactgggaggtactgatcggggtcttggtggtctccatcctgcttctctccctcctcctcttcctcctcctccaacactggcgtcagggaaaacacaggacattggcccagagacaggctgatttccaacgtcctccaggggctgccgagccagagcccaaggacgggggcctacagaggaggtccagcccagctgctgacgtccagggagaaaacttctgtgctgccgtgaagaacacacagcctgaggacggggtggaaatggacactcggcagagcccacacgatgaagacccccaggcagtgacgtatgccaaggtgaaacactccagacctaggagagaaatggcctctcctccctccccactgtctggggaattcctggacacaaaggacagacaggcagaagaggacagacagatggacactgaggctgctgcatctgaagccccccaggatgtgacctacgcccagctgcacagctttaccctcagacagaaggcaactgagcctcctccatcccaggaaggggcctctccagctgagcccagtgtctatgccactctggccatccactaatccaggggggacccagaccccacaagccatggagactcaggaccccagaaggcatggaagctgcctccagtagacatcactgaaccccagccagcccagacccctgacacagaccactagaagattccgggaacgttgggagtcacctgattctgcaaagataaataatatccctgcattatcaaaataaagtagcagacctctcaattca

SEQ ID NO: 319 - DNA, 1625 bp, Homo sapiens
cacagctggggcccctgggaggagacgccatgatccccaccttcacggctctgctctgcctcgggctgagtctgggccccaggacccacatgcaggcagggcccctccccaaacccaccctctgggctgagccaggctctgtgatcagctgggggaactctgtgaccatctggtgtcaggggaccctggaggctcgggagtaccgtctggataaagaggaaagcccagcaccctgggacagacagaacccactggagcccaagaacaaggccagattctccatcccatccatgacagaggactatgcagggagataccgctgttactatcgcagccctgtaggctggtcacagcccagtgaccccctggagctggtgatgacaggagcctacagtaaacccaccctttcagccctgccgagtcctcttgtgacctcaggaaagagcgtgaccctgctgtgtcagtcacggagcccaatggacacttttcttctgatcaaggagcgggcagcccatcccctactgcatctgagatcagagcacggagctcagcagcaccaggctgaattccccatgagtcctgtgacctcagtgcacggggggacctacaggtgcttcagctcacacggcttctcccactacctgctgtcacaccccagtgaccccctggagctcatagtctcaggatccttggagggtcccaggccctcacccacaaggtccgtctcaacagctgcaggccctgaggaccagcccctcatgcctacagggtcagtcccccacagtggtctgagaaggcactgggaggtactgatcggggtcttggtggtctccatcctgcttctctccctcctcctcttcctcctcctccaacactggcgtcagggaaaacacaggacattggcccagagacaggctgatttccaacgtcctccaggggctgccgagccagagcccaaggacgggggcctacagaggaggtccagcccagctgctgacgtccagggagaaaacttctgtgctgccgtgaagaacacacagcctgaggacggggtggaaatggacactcggcagagcccacacgatgaagacccccaggcagtgacgtatgccaaggtgaaacactccagacctaggagagaaatggcctctcctccctccccactgtctggggaattcctggacacaaaggacagacaggcagaagaggacagacagatggacactgaggctgctgcatctgaagccccccaggatgtgacctacgcccggctgcacagctttaccctcagacagaaggcaactgagcctcctccatcccaggaaggggcctctccagctgagcccagtgtctatgccactctggccatccactaatccaggggggacccagaccccacaagccatggagactcaggaccccagaaggcatggaagctgcctccagtagacatcactgaaccccagccagcccagacccctgacacagaccactagaagattccgggaacgttgggagtcacctgattctgcaaagataaataatatccctgcattatcaaaataaagtagcagacctctcaattcacaatgagttaactgataaaacaaaacagaagtcaaaaa

SEQ ID NO: 320 - DNA, 3096 bp, Homo sapiens
catcttgcatcagcctgtggatgtatgcctaccaccgggctccttcaccagcaaagtggaaaaagaagcgtttcacaacaaattcttctttttgggttggggaaacgcagtggattatagctctgttttcttctttccaaaactgtgcacccctggatgaaacctccatcaagggagacctacaagttgcctggggttcagtgctctagaaagttccaaggtttgtggcttgaattattctaaagaagctgaaataattgaagagaagcagaggccagctgtttttgaggatcctgctccacagagaatgctctgcacccgttgatactccagttccaacaccatcttctgagatgatcctgattcccagaatgctcttggtgctgttcctgctgctgcctatcttgagttctgcaaaagctcaggttaatccagctatatgccgctatcctctgggcatgtcaggaggccagattccagatgaggacatcacagcttccagtcagtggtcagagtccacagctgccaaatatggaaggctggactcagaagaaggggatggagcctggtgccctgagattccagtggaacctgatgacctgaaggagtttctgcagattgacttgcacaccctccattttatcactctggtggggacccaggggcgccatgcaggaggtcatggcatcgagtttgcccccatgtacaagatcaattacagtcgggatggcactcgctggatctcttggcggaaccgtcatgggaaacaggtgctggatggaaatagtaacccctatgacattttcctaaaggacttggagccgcccattgtagccagatttgtccggttcattccagtcaccgaccactccatgaatgtgtgtatgagagtggagctttacggctgtgtctggctagatggcttggtgtcttacaatgctccagctgggcagcagtttgtactccctggaggttccatcatttatctgaatgattctgtctatgatggagctgttggatacagcatgacagaagggctaggccaattgaccgatggtgtgtctggcctggacgatttcacccagacccatgaataccacgtgtggcccggctatgactatgtgggctggcggaacgagagtgccaccaatggctacattgagatcatgtttgaatttgaccgcatcaggaatttcactaccatgaaggtccactgcaacaacatgtttgctaaaggtgtgaagatctttaaggaggtacagtgctacttccgctctgaagccagtgagtgggaacctaatgccatttccttcccccttgtcctggatgacgtcaaccccagtgctcggtttgtcacggtgcctctccaccaccgaatggccagtgccatcaagtgtcaataccattttgcagatacctggatgatgttcagtgagatcaccttccaatcagatgctgcaatgtacaacaactctgaagccctgcccacctctcctatggcacccacaacctatgatccaatgcttaaagttgatgacagcaacactcggatcctgattggctgcttggtggccatcatctttatcctcctggccatcattgtcatcatcctctggaggcagttctggcagaaaatgctggagaaggcttctcggaggatgctggatgatgaaatgacagtcagcctttccctgccaagtgattctagcatgttcaacaataaccgctcctcatcacctagtgaacaagggtccaactcgacttacgatcgcatctttccccttcgccctgactaccaggagccatccaggctgatacgaaaactcccagaatttgctccaggggaggaggagtcaggctgcagcggtgttgtgaagccagtccagcccagtggccctgagggggtgccccactatgcagaggctgacatagtgaacctccaaggagtgacaggaggcaacacatactcagtgcctgccgtcaccatggacctgctctcaggaaaagatgtggctgtggaggagttccccaggaaactcctaactttcaaagagaagctgggagaaggacagtttggggaggttcatctctgtgaagtggagggaatggaaaaattcaaagacaaagattttgccctagatgtcagtgccaaccagcctgtcctggtggctgtgaaaatgctccgagcagatgccaacaagaatgccaggaatgattttcttaaggagataaagatcatgtctcggctcaaggacccaaacatcatccatctattatctgtgtgtatcactgatgaccctctctgtatgatcactgaatacatggagaatggagatctcaatcagtttctttcccgccacgagccccctaattcttcctccagcgatgtacgcactgtcagttacaccaatctgaagtttatggctacccaaattgcctctggcatgaagtacctttcctctcttaattttgttcaccgagatctggccacacgaaactgtttagtgggtaagaactacacaatcaagatagctgactttggaatgagcaggaacctgtacagtggtgactattaccggatccagggccgggcagtgctccctatccgctggatgtcttgggagagtatcttgctgggcaagttcactacagcaagtgatgtgtgggcctttggggttactttgtgggagactttcaccttttgtcaagaacagccctattcccagctgtcagatgaacaggttattgagaatactggagagttcttccgagaccaagggaggcagacttacctccctcaaccagccatttgtcctgactctgtgtataagctgatgctcagctgctggagaagagatacgaagaaccgtccctcattccaagaaatccaccttctgctccttcaacaaggcgacgagtgatgctgtcagtgcctggccatgttcctacggctcaggtcctccctacaagacctaccactcacccatgcctatgccactccatctggacatttaatgaaactgagagacagaggcttgtttgctttgccctcttttcctggtcacccccactccctacccctgactcatatatact

SEQ ID NO: 321 - DNA, 3206 bp, Homo sapiens
aaaggcatcttgcatcagcctgtggatgtatgcctaccaccgggctccttcaccagcaaagtggaaaaagaagcgtttcacaacaaattcttctttttgggttggggaaacgcagtggattatagctctgttttcttctttccaaaactgtgcacccctggatgaaacctccatcaagggagacctacaagttgcctggggttcagtgctctagaaagttccaaggtttgtggcttgaattattctaaagaagctgaaataattgaagagaagcagaggccagctgtttttgaggatcctgctccacagagaatgctctgcacccgttgatatgcctcccaggacccagagggagactgtagcctcatttctgtggagacctttggctggactctcctggctctcccagagactccagttccaacaccatcttctgagatgatcctgattcccagaatgctcttggtgctgttcctgctgctgcctatcttgagttctgcaaaagctcaggttaatccagctatatgccgctatcctctgggcatgtcaggaggccagattccagatgaggacatcacagcttccagtcagtggtcagagtccacagctgccaaatatggaaggctggactcagaagaaggggatggagcctggtgccctgagattccagtggaacctgatgacctgaaggagtttctgcagattgacttgcacaccctccattttatcactctggtggggacccaggggcgccatgcaggaggtcatggcatcgagtttgcccccatgtacaagatcaattacagtcgggatggcactcgctggatctcttggcggaaccgtcatgggaaacaggtgctggatggaaatagtaacccctatgacattttcctaaaggacttggagccgcccattgtagccagatttgtccggttcattccagtcaccgaccactccatgaatgtgtgtatgagagtggagctttacggctgtgtctggctagatggcttggtgtcttacaatgctccagctgggcagcagtttgtactccctggaggttccatcatttatctgaatgattctgtctatgatggagctgttggatacagcatgacagaagggctaggccaattgaccgatggtgtgtctggcctggacgatttcacccagacccatgaataccacgtgtggcccggctatgactatgtgggctggcggaacgagagtgccaccaatggctacattgagatcatgtttgaatttgaccgcatcaggaatttcactaccatgaaggtccactgcaacaacatgtttgctaaaggtgtgaagatctttaaggaggtacagtgctacttccgctctgaagccagtgagtgggaacctaatgccatttccttcccccttgtcctggatgacgtcaaccccagtgctcggtttgtcacggtgcctctccaccaccgaatggccagtgccatcaagtgtcaataccattttgcagatacctggatgatgttcagtgagatcaccttccaatcggatgctgcaatgtacaacaactctgaagccctgcccacctctcctatggcacccacaacctatgatccgatgcttaaagttgatgacagcaacactcggatcctgattggctgcttggtggccatcatctttatcctcctggccatcattgtcatcatcctgtggaggcagttctggcagaaaatgctggagaaggcttctcggaggatgctggatgatgaaatgacagtcagcctttccctgccaagtgattctagcatgttcaacaataaccgctcctcatcacctagtgaacaagggtccaactcgacttacgatcgcatctttccccttcgccctgactaccaggagccatccaggctgatacgaaaactcccagaatttgctccaggggaggaggagtcaggctgcagcggtgttgtgaagccagtccagcccagtggccctgagggggtgccccactatgcagaggctgacatagtgaacctccaaggagtgacaggaggcaacacatactcagtgcctgccgtcaccatggacctgctctcaggaaaagatgtggctgtggaggagttccccaggaaactcctaactttcaaagagaagctgggagaaggacagtttggggaggttcatctctgtgaagtggagggaatggaaaaattcaaagacaaagattttgccctagatgtcagtgccaaccagcctgtcctggtggctgtgaaaatgctccgagcagatgccaacaagaatgccaggaatgattttcttaaggagataaagatcatgtctcggctcaaggacccaaacatcatccatctattagctgtgtgtatcactgatgaccctctctgtatgatcactgaatacatggagaatggagatctcaatcagtttctttcccgccacgagccccctaattcttcctccagcgatgtacgcactgtcagttacaccaatctgaagtttatggctacccaaattgcctctggcatgaagtacctttcctctcttaattttgttcaccgagatctggccacacgaaactgtttagtgggtaagaactacacaatcaagatagctgactttggaatgagcaggaacctgtacagtggtgactattaccggatccagggccgggcagtgctccctatccgctggatgtcttgggagagtatcttgctgggcaagttcactacagcaagtgatgtgtgggcctttggggttactttgtgggagactttcaccttttgtcaagaacagccctattcccagctgtcagatgaacaggttattgagaatactggagagttcttccgagaccaagggaggcagacttacctccctcaaccagccatttgtcctgactctgtgtataagctgatgctcagctgctggagaagagatacgaagaaccgtccctcattccaagaaatccaccttctgctccttcaacaaggcgacgagtgatgctgtcagtgcctggccatgttcctacggctcaggtcctccctacaagacctaccactcacccatgcctatgccactccatctggacatttaatgaaactgagagacagaggcttgtttgctttgccctcttttcctggtcacccccactccctacccctgactcatatatactttttttttttttacattaaagaact

SEQ ID NO: 322 - DNA, 3096 bp, Homo sapiens; identical to SEQ ID NO: 320

SEQ ID NO: 323 - DNA, 1332 bp, Homo sapiens
atgccttactcttcttgaaattttaacctatgatattttctgtgcctgaatatttgttatgtagataacaagacctcagtgccttcctgtttttcacattttccttttcaaatagggtctaactcagcaactcgctttaggtcagcagcctccctgaagaccaaaattagaatatccatgacctagttttccatgcgtgtttctgactctgagctacagagtctggtgaagctcacttctgggcttcatctggcaacatctttatccgtagtgggtatggttgacactagcccaatgaaatgaattaaagtggaccaatagggctgagctctctgtgggctggcagtcctggaagccagctttccctgcctctcatcaactgaatgaggtcagcatgtctattcagcttcgtttattttcaagaataatcacgctttcctgaatccaaactaatccatcaccggggtggtttagtggctcaacattgtgttcccatttcagctgatcagtgggcctccaaggaggggctgtaaaatggaggccattgtgtgagcctatcagagttgctgcaaacctgacccctgctcagtaaagcacttgcaaccgtctgttatgctgtgacacatggcccctccccctgccaggagctttggacctaatccaagcatctctttgcccagaaagaagatgggggaggaggcagtaataaaaagattgaagtattttgctggaataagttcaaattcttctgaactcaaactgaggaatttcacctgtaaacctgagtcgtacagaaagctgcctggtatatccaaaagctttttattcctcctgctcatattgtgattctgcctttggggacttttcttaaaccttcagttatgatttttttttcatacacttattggaactctgcttgatttttgcctcttccagtcttcctgacactttaattaccaacctgttacctactttgactttttgcatttaaaacagacactggcatggatatagttttacttttaaactgtgtacataactgaaaatgtgctatactgcatactttttaaatgtaaagatatttttatctttatatgaagaaaatcacttaggaaatggctttgtgattcaatctgtaaactgtgtattccaagacatgtctgttctacatagatgcttagtccctcatgcaaatcaattactggtccaaaagattgctgaaattttatatgcttactgatatattttacaattttttatcatgcatgtcctgtaaaggttacaagcctgcacaataaaaatgtttaacggttaaaaaaaaaaaaaaaaaaa

SEQ ID NO: 324 - DNA, 2704 bp, Homo sapiens
gggagaaacgttctcactcgctctctgctcgctgcgggcgctccccgccctctgctgccagaaccttggggatgtgcctagacccggcgcagcacacgtccgggccaaccgcgagcagaacaaacctttggcgggcggccaggaggctccctcccagccaccgcccccctccagcgcctttttttccccccatacaatacaagatcttccttcctcagttcccttaaagcacagcccagggaaacctcctcacagttttcatccagccacgggccagcatgtctgggggcaaatacgtagactcggagggacatctctacaccgttcccatccgggaacagggcaacatctacaagcccaacaacaaggccatggcagacgagctgagcgagaagcaagtgtacgacgcgcacaccaaggagatcgacctggtcaaccgcgaccctaaacacctcaacgatgacgtggtcaagattgactttgaagatgtgattgcagaaccagaagggacacacagttttgacggcatttggaaggccagcttcaccaccttcactgtgacgaaatactggttttaccgcttgctgtctgccctctttggcatcccgatggcactcatctggggcatttacttcgccattctctctttcctgcacatctgggcagttgtaccatgcattaagagcttcctgattgagattcagtgcatcagccgtgtctattccatctacgtccacaccgtctgtgacccactctttgaagctgttgggaaaatattcagcaatgtccgcatcaacttgcagaaagaaatataaatgacatttcaaggatagaagtatacctgattttttttccttttaattttcctggtgccaatttcaagttccaagttgctaatacagcaacaatttatgaattgaattatcttggttgaaaataaaaagatcactttctcagttttcataagtattatgtctcttctgagctatttcatctatttttggcagtctgaatttttaaaacccatttaaatttttttccttacctttttatttgcatgtggatcaaccatcgctttattggctgagatatgaacatattgttgaaaggtaatttgagagaaatatgaagaactgaggaggaaaaaaaaaaaaaagaaaagaaccaacaacctcaactgcctactccaaaatgttggtcattttatgttaagggaagaattccagggtatggccatggagtgtacaagtatgtgggcagattttcagcaaactcttttcccactgtttaaggagttagtggattactgccattcacttcataatccagtaggatccagtgatccttacaagttagaaaacataatcttctgccttctcatgatccaactaatgccttactcttcttgaaattttaacctatgatattttctgtgcctgaatatttgttatgtagataacaagacctcagtgccttcctgtttttcacattttccttttcaaatagggtctaactcagcaactcgctttaggtcagcagcctccctgaagaccaaaattagaatatccatgacctagttttccatgcgtgtttctgactctgagctacagagtctggtgaagctcacttctgggcttcatctggcaacatctttatccgtagtgggtatggttgacactagcccaatgaaatgaattaaagtggaccaatagggctgagctctctgtgggctggcagtcctggaagccagctttccctgcctctcatcaactgaatgaggtcagcatgtctattcagcttcgtttattttcaagaataatcacgctttcctgaatccaaactaatccatcaccggggtggtttagtggctcaacattgtgttcccatttcagctgatcagtgggcctccaaggaggggctgtaaaatggaggccattgtgtgagcctatcagagttgctgcaaacctgacccctgctcagtaaagcacttgcaaccgtctgttatgctgtgacacatggcccctccccctgccaggagctttggacctaatccaagcatccctttgcccagaaagaagatgggggaggaggcagtaataaaaagattgaagtattttgctggaataagttcaaattcttctgaactcaaactgaggaatttcacctgtaaacctgagtcgtacagaaagctgcctggtatatccaaaagctttttattcctcctgctcatattgtgattctgcctttggggacttttcttaaaccttcagttatgatttttttttcatacacttattggaactctgcttgatttttgcctcttccagtcttcctgacactttaattaccaacctgttacctactttgactttttgcatttaaaacagacactggcatggatatagttttacttttaaactgtgtacataactgaaaatgtgctatactgcatactttttaaatgtaaagatatttttatctttatatgaagaaaatcacttaggaaatggctttgtgattcaatctgtaaactgtgtattccaagacatgtctgttctacatagatgcttagtccctcatgcaaatcaattactggtccaaaagattgctgaaattttatatgcttactgatatattttacaattttttatcatgcatgtcctgtaaaggttacaagcctgcacaataaaaatgtttaacggtt

SEQ ID NO: 325 - DNA, 1653 bp, Homo sapiens
taaagcacagcccagggaaacctcctcacagttttcatccagccacgggccagcacgtctgggggcaaatacgtagactcggaggtaggcatccgtgggggggcgccggctcgggcgtgcggggagtgtccgcttctgctatctgcctctccaaatatcccgactgctgccctggccccagccctctctccacttcggagcactcctctggcgttggcaccgctgaggaatgggcctgggcggggaggtgaagagaagccaggaatgttttatgttttcctaatggagagggggcctcgggagcccctgagctaggaggacacggaaaaggggattggggtcctgagattgggtctgttgggcccaggacgcgttttctggatgggtctaggatgctcccctgtcgcgggacccccgcggtccggccctgcctgctgggggttcgaagaggtggagtgcagggtggaggtgttatttacccgagtcctggggacagtccccgggactctccgccaggcgcccagaccggcaggtcccgcaggcggcgcgcggtgtgtttgcactttccaaagttcttgaaccatctcaagaactccttctgcatcttggcgtctggcaggggtgttccgagagaggtagacctcccctccccaaactgccaccatcacttccaacgccctccacgcgctggagctctgcccgggtgtggaaacctcgtcttccaacacgtagctgcccttcagccacccgcccgcagcctgggagtgccctgagggtgggtcgggggagctgcgcagggacatctctacaccgttcccatccgggaacagggcaacatctacaagcccaacaacaaggccatggcagacgagctgagcgagaagcaagtgtacgacgcgcacaccaaggagatcgacctggtcaaccgcgaccctaaacacctcaacgatgacgtggtcaagattgactttgaagatgtgattgcagaaccagaagggacacacagttttgacggcatttggaaggccagcttcaccaccttcactgtgacgaaatactggttttaccgcttgctgtctgccctctttggcatcccgatggcactcatctggggcatttacttcgccattctctctttcctgcacatctgggcagttgtaccatgcattaagagcttcctgattgagattcagtgcatcagccgtgtctattccatctacgtccacaccgtctgtgacccactctttgaagctgttgggaaaatattcagcaatgtccgcatcaacttgcagaaagaaatataaatgacatttcaaggatagaagtatacctgattttttttccttttaattttcctggtgccaatttcaagttccaagttgctaatacagcaacaatttatgaattgaattatcttggttgaaaataaaaagatcactttctcagttttcataagtattatgtctcttctgagctatttcatctatttttggcagtctgaatttttaaaacccatttaaatttttttccttacctttttatttgcatgtggatcaaccatcgctttattggctgagatatgaacatattgttgaaaggtaatttgagagaaatatgaagaactgaggaggaaaaaaaaaaaaaaaaaaaaaa

SEQ ID NO: 326 - DNA, 3177 bp, Homo sapiens
gtttgcgaccccgagtcccatgacaccgcttctcctcacaccccagtccgcagtgcccctccccagcctcggccgggcctcccgggagccgggcgtggcgttccagctagtgagccgtttctcccctgggctcggaggcggaagcttgaggggcgcggggaggagcttcgcgtgcggggtgaacgcccgctctacgtgctcgttctcttcgcgaccgctgcgcgcgagccccgtgtccccacggcgggcagtagcggcggcggcggcggctgaacgcggagggggcggagggagcccgcggcggcggcagcagctacagcgaaatggcggagaccgtggctgacacccggcggctgatcaccaagccgcagaacctgaatgacgcctacggaccccccagcaacttcctcgagatcgatacaaatcttcctattttcaagctgaaagaatctactgttagaagaagatacagtgactttgaatggctgcgaagtgaattagaaagagagagcaaggtcgtagttcccccgctccctgggaaagcgtttttgcgtcagcttccttttagaggagatgatggaatatttgatgacaattttattgaggaaagaaaacaagggctggagcagtttataaacaaggtcgctggtcatcctctggcacagaacgaacgttgtcttcacatgtttttacaagatgaaataatagataaaagctatactccatctaaaataagacatgcctgaaatttggcaagaaggggcaaatacgtagactcggagggacatctctacaccgttcccatccgggaacagggcaacatctacaagcccaacaacaaggccatggcagacgagctgagcgagaagcaagtgtacgacgcgcacaccaaggagatcgacctggtcaaccgcgaccctaaacacctcaacgatgacgtggtcaagattgactttgaagatgtgattgcagaaccagaagggacacacagttttgacggcatttggaaggccagcttcaccaccttcactgtgacgaaatactggttttaccgcttgctgtctgccctctttggcatcccgatggcactcatctggggcatttacttcgccattctctctttcctgcacatctgggcagttgtaccatgcattaagagcttcctgattgagattcagtgcatcagccgtgtctattccatctacgtccacaccgtctgtgacccactctttgaagctgttgggaaaatattcagcaatgtccgcatcaacttgcagaaagaaatataaatgacatttcaaggatagaagtatacctgattttttttccttttaattttcctggtgccaatttcaagttccaagttgctaatacagcaacaatttatgaattgaattatcttggttgaaaataaaaagatcactttctcagttttcataagtattatgtctcttctgagctatttcatctatttttggcagtctgaatttttaaaacccatttaaatttttttccttacctttttatttgcatgtggatcaaccatcgctttattggctgagatatgaacatattgttgaaaggtaatttgagagaaatatgaagaactgaggagggaaaaaaaaaaaaagaaaagaaccaacaacctcaactgcctactccaaaatgttggtcattttatgttaagggaagaattccagggtatggccatggagtgtacaagtatgtgggcagattttcagcaaactcttttcccactgtttaaggagttagtggattactgccattcacttcataatccagtaggatccagtgatccttacaagttagaaaacataatcttctgccttctcatgatccaactaatgccttactcttcttgaaattttaacctatgatattttctgtgcctgaatatttgttatgtagataacaagacctcagtgccttcctgtttttcacattttccttttcaaatagggtctaactcagcaactcgctttaggtcagcagcctccctgaagaccaaaattagaatatccatgacctagttttccatgcgtgtttctgactctgagctacagagtctggtgaagctcacttctgggcttcatctggcaacatctttatccgtagtgggtatggttgacactagcccaatgaaatgaattaaagtggaccaatagggctgagctctctgtgggctggcagtcctggaagccagctttccctgcctctcatcaactgaatgaggtcagcatgtctattcagcttcgtttattttcaagaataatcacgctttcctgaatccaaactaatccatcaccagggtggtttagtggctcaacattgtgttcccatttcagctgatcagtgggcctccaaggaggggctgtaaaatggaggccattgtgtgagcctatcagagttgctgcaaacctgacccctgctcagtaaagcacttgcaaccgtctgttatgctgtgacacatggcccctccccctgccaggagctttggacctaatccaagcatccctttgcccagaaagaagatgggggaggaggcagtaataaaaagattgaagtattttgctggaataagttcaaattcttctgaactcaaactaaggaatttcacctgtaaacctgagtcgtacagaaagctgcctggtatatccaaaagctttttattcctcctgctcatattgtgattctgcctttggggacttttcttaaaccttcagttatgattttttttcatacacttattggaactctgcttgatttttgcctcttccagtcttcctgacactttaattaccaacctgttacctactttgactttttgcatttaagacagacactggcatggatatagttttacttttaaactgtgtacataactgaaaatgtgctatactgcatactttttaaatgtaaagatatttttatctttatatgaagaaaatcacttaggaaatggctttgtgattcaatctgtaaactgtgtattccaagacatgtctgttctacatagatgcttagtccctcatgcaaatcaattactggtccaaaagattgctgaaattttatatgcttactgatatattttacaattttttatcatgcatgtcctgtaaaggttacaagcctgcacaataaaaatgtttaacggtt

SEQ ID NO: 327 - DNA, 956 bp, Homo sapiens
cttcctttctcagttcccttaaagcacagcccagggaaacctcctcacagttttcatccagccacgggccagcatgtctgggggcaaatacgtagactcggagggacatctctacaccgttcccatccgggaacagggcaacatctacaagcccaacaacaaggccatggcagacgagctgagcgagaagcaagtgtacgacgcgcacaccaaggagatcgacctggtcaaccgcgaccctaaacacctcaacgatgacgtggtcaagattgactttgaagatgtgattgcagaaccagaagggacacacagttttgacggcatttggaaggccagcttcaccaccttcactgtgacgaaatactggttttaccgcttgctgtctgccctctttggcatcccgatggcactcatctggggcatttacttcgccattctctctttcctgcacatctgggcagttgtaccatgcattaagagcttcctgattgagattcagtgcatcagccgtgtctattccatctacgtccacaccgtctgtgacccactctttgaagctgttgggaaaatattcagcaatgtccgcatcaacttgcagaaagaaatataaatgacatttcaaggatagaagtatacctgattttttttccttttaattttcctggtgccaatttcaagttccaagttgctaatacagcaacaatttatgaattgaattatcttggttgaaaataaaaagatcactttctcagttttcataagtattatgtctcttctgagctatttcatctatttttggcagtctgaatttttaaaacccatttaaatttttttccttacctttttatttgcatgtggatcaaccatcgctttattggctgagatatgaacatattgttgaaaggtaatttgagagaaatatgaagaactgaggaggaaaaaaaaaaaaaaaaaaa

SEQ ID NO: 328 - DNA, 838 bp, Homo sapiens
gaattccggagttttcatccagccacgggccagcatgtctgggggcaaatacgtagactcggagggacatctctacaccgttcccatccgggaacagggcaacatctacaagcccaacaacaaggccatggcagacgagctgagcgagaagcaagtgtacgacgcgcacaccaaggagatcgacctggtcaaccgcgaccctaaacacctcaacgatgacgtggtcaagattgactttgaagatgtgattgcagaaccagaagggacacacagttttcacggcatttggaaggccagcttcaccaccttcactgtgacgaaatactggttttaccgcttgctgtctgccctctttggcatcccgatggcactcatctggggcatttacttcgccattctctctttcctgcacatctgggcagttgtaccatgcattaagagcttcctgattgagattcagtgcaccagccgtgtctattccatctacgtccacaccgtctgtgacccactctttgaagctgttgggaaaatattcagcaatgtccgcatcaacttgcagaaagaaatataaatgacatttcaaggatagaagtatacctgattttttttccttttaattttcctggtgccaatttcaagttccaagttgctaatacagcaacgaatttatgaattgaattatcttggttgaaaataaaaagatcactttctcagttttcataagtattatgtctcttctgagctatttcatctatttttggcagtctgaatttttaaaacccatttatatttctttccttacctttttatttgcatgtggatcaaccatcgctttatt

SEQ ID NO: 329 - DNA, 785 bp, Homo sapiens
cggacgcgtggcagagttgctgcaaacctgacccctgctcagtaaagcacttgcaaccgtctgttatgctgtgacacatggcccctccccctgccaggagctttggacctaatccaagcatctctttgcccagaaagaagatgggggaggaggcagtaataaaaagattgaagtattttgctggaataagttcaaattcttctgaactcaaactgaggaatttcacctgtaaacctgagtcgtacagaaagctgcctggtatatccaaaagctttttattcctcctgctcatattgtgattctgcctttggggacttttcttaaaccttcagttatgatttttttttcatacacttattggaactctgcttgatttttgcctcttccagtcttcctgacactttaattaccaacctgttacctactttgactttttgcatttaaaacagacactggcatggatatagttttacttttaaactgtgtacataactgaaaatgtgctatactgcatactttttaaatgtaaagatatttttatctttatatgaagaaaatcacttaggaaatggctttgtgattcaatctgtaaactgtgtattccaagacatgtctgttctacatagatgcttagtccctcatgcaaatcaattactggtccaaaagattgctgaaattttatatgcttactgatatattttacaattttttatcatgcatgtcctgtaaaggttacaagcctgcacaataaaaatgtttaacggttaaaaaaaaaaaaaaaaagg

SEQ ID NO: 330 - DNA, 648 bp, Homo sapiens
gtttttttttttttttttttaaccgttaaacatttttattgtgcaggcttgtaacctttacaggacatgcatgataaaaaattgtaaaatatatcagtaagcatataaaatttcagcaatcttttggaccagtaattgatttgcatgagggactaagcatctatgtagaacagacatgtcttggaatacacagtttacagattgaatcacaaagccatttcctaagtgattttcttcatataaagataaaaatatctttacatttaaaaagtatgcagtatagcacattttcagttatgtacacagtttaaaagtaaaactatatccatgccagtgtctgttttaaatgcaaaaagtcaaagtaggtaacaggttggtaattaaagtgtcaggaagactggaagaggcaaaaatcaagcagagttccaataagtgtatgaaaaaaaaatcataactgaaggtttaagaaaagtccccaaaggcagaatcacaatatgagcaggaggaataaaaagcttttggatataccaggcagctttctgtacgactcaggtttacaggtgaaattcctcagtttgagttcagaagaatttgaacttattccagcaaaatacttcaatctttttattactgcctcctcccccattc

SEQ ID NO: 331 - DNA, 1225 bp, Homo sapiens
gcggctctctgatccagcccgggagaggaccgagctggaggagctgggtgtggggtgcgttgggctggtggggaggcctagtttgggtgcaagtaggtctgattgagcttgtgttgtgctgaagggacagccctgggtctaggggagagagtccctgagtgtgagacccgccttccccggtcccagcccctcccagttcccccagggacggccacttcctggtccccgacgcaaccatggctgaagaacaaccgcaggtcgaattgttcgtgaaggctggcagtgatggggccaagattgggaactgcccattctcccagagactgttcatggtactgtggctcaagggagtcaccttcaatgttaccaccgttgacaccaaaaggcggaccgagacagtgcagaagctgtgcccaggggggcagctcccattcctgctgtatggcactgaagtgcacacagacaccaacaagattgaggaatttctggaggcagtgctgtgccctcccaggtaccccaagctggcagctctgaaccctgagtccaacacagctgggctggacatatttgccaaattttctgcctacatcaagaattcaaacccagcactcaatgacaatctggagaagggactcctgaaagccctgaaggttttagacaattacttaacatcccccctcccagaagaagtggatgaaaccagtgctgaagatgaaggtgtctctcagaggaagtttttggatggcaacgagctcaccctggctgactgcaacctgttgccaaagttacacatagtacaggtggtgtgtaagaagtaccggggattcaccatccccgaggccttccggggagtgcatcggtacttgagcaatgcctacgcccgggaagaattcgcttccacctgtccagatgatgaggagatcgagctcgcctatgagcaagtggcaaaggccctcaaataagcccctcctgggactccctcaaccccctccattttctccacaaaggccctggtggtttccacattgctacccaatggacacactccaaaatggccagtgggcagggaatcctggagcacttgttccgggatggtgtggtggaagaggggatgagggaaagaaatggggggcctgggtcagatttttattgtggggtggggtgagtaggacaacatatttcagtaataaaatacagaataaaaatcaagtgtttttaaaaaaaa

SEQ ID NO: 332 - DNA, 1258 bp, Homo sapiens
cggcgctgagctggaattcgcggccgcgtcgacgcggctctctgatccagcccgggagaggaccgagctggaggagctgggtgtggggtgcgttgggctggtggggaggcctagtttgggtgcaagtaggtctgattgagcttgtgttgtgctgaagggacagccctgggtctaggggagagagtccctgagtgtgagacccgccttccccggtcccagcccctcccagttcccccagggacggccacttcctggtccccgacgcaaccatggctgaagaacaaccgcaggtcgaattgttcgtgaaggctggcagtgatggggccaagattgggaactgcccattctcccagagactgttcatggtactgtggctcaagggagtcaccttcaatgttaccaccgttgacaccaaaaggcggaccgagacagtgcagaagctgtgcccaggggggcagctcccattcctgctgtatggcactgaagtgcacacagacaccaacaagattgaggaatttctggaggcagtgctgtgccctcccaggtaccccaagctggcagctctgaaccctgagtccaacacagctgggctggacatatttgccaaattttctgcctacatcaagaattcaaacccagcactcaatgacaatctggagaagggactcctgaaagccctgaaggttttagacaattacttaacatcccccctcccagaagaagtggatgaaaccagtgctgaagatgaaggtgtctctcagaggaagtttttggatggcaacgagctcaccctggctgactgcaacctgttgccaaagttacacatagtacaggtggtgtgtaagaagtaccggggattcaccatccccgaggccttccggggagtgcatcggtacttgagcaatgcctacgcccgggaagaattcgcttccacctgtccagatgatgaggagatcgagctcgcctatgagcaagtggcaaaggccctcaaataagcccctcctgggactccctcaaccccctccattttctccacaaaggccctggtggtttccacattgctacccaatggacacactccaaaatggccagtgggcagggaatcctggagcacttgttccgggatggtgtggtggaagaggggatgagggaaagaaatggggggcctgggtcagatttttattgtggggtgggatgagtaggacaacatatttcagtaataaaatacagaataaaaatcaagtgtttttaaaaaaaa

SEQ ID NO: 333 - DNA, 1017 bp, Homo sapiens
gggcccacacccagttcccccagggacggccacttcctggtccccgacgcaaccatggctgaagaacaaccgcaggtcgaattgttcgtgaaggctggcagtgatggggccaagattgggaactgcccattctcccagagactgttcatggtactgtggctcaagggagtcaccttcaatgttaccaccgttgacaccaaaaggcggaccgagacagtgcagaagctgtgcccagggggggagctcccattcctgctgtatggcactgaagtgcacacagacaccaacaagattgaggaatttctggaggcagtgctgtgccctcccaggtaccccaagctggcagctctgaaccctgagtccaacacagctgggctggacatatttgccaaattttctgcctacatcaagaattcaaacccagcactcaatgacaatctggagaagggactcctgaaagccctgaaggttttagacaattacttaacatcccccctcccagaagaagtggatgaaaccagtgctgaagatgaaggtgtctctcagaggaagtttttggatggcaacgagctcaccctggctgactgcaacctgttgccaaagttacacatagtacaggtggtgtgtaagaagtaccggggattcaccatccccgaggccttccggggagtgcatcggtacttgagcaatgcctacgcccgggaagaattcgcttccacctgtccagatgatgaggagatcgagctcgcctatgagcaagtggcaaaggccctcaaataagcccctcctgggactccctcaaccccctccattttctccacaaaggccctggtggtttccacattgctacccaatggacacactccaaaatggccagtgggcagggaatcctggagcacttgttccgggatggtgtggtggaagaggggatgagggaaagaaatggggggcctgggtcagatttttattgtggggtggggtgagtaggacaacatatttcagtaataaaatacagaa

SEQ ID NO: 334 - DNA, 1193 bp, Homo sapiens
gagctggaggagctgggtgtggggtgcgttgggctggtggggaggcctagtttgggtgcaagtaggtctgattgagcttgtgttgtgctgaagggacagccctgggtctaggggagagagtccctgagtgtgagacccgccttccccggtcccagcccctcccagttcccccagggacggccacttcctggtccccgacgcaaccatggctgaagaacaaccgcagtcgaattgttcgtgaaggctggcagtgatggggccaagattgggaactgcccattctcccagagactgttcatggtactgtggctcaagggagtcaccttcaatgttaccaccgttgacaccaaaaggcggaccgagacagtgcagaagctgtgcccaggggggcagctcccattcctgctgtatggcactgaagtgcacacagacaccaacaagattgaggaatttctggaggcagtgctgtgccctcccaggtaccccaagctggcagctctgaaccctgagtccaacacagctgggctggacatatttgccaaattttctgcctacatcaagaattcaaacccagcactcaatgacaatctggagaagggactcctgaaagccctgaaggttttagacaattacttaacatcccccctcccagaagaagtggatgaaaccagtgctgaagatgaaggtgtctctcagaggaagtttttggatggcaacgagctcaccctggctgactgcaacctgttgccaaagttacacatagtacaggtggtgtgtaagaagtaccggggattcaccatccccgaggccttccggggagtgcatcggtacttgagcaatgcctacgcccgggaagaattcgcttccacctgtccagatgatgaggagatcgagctcgcctatgagcaagtggcaaaggccctcaaataagcccctcctgggactccctcaaccccctccattttctccacaaaggccctggtggtttccacattgctacccaatggacacactccaaaatggccagtgggcagggaatcctggagcacttgttccgggatggtgtggtggaagaggggatgagggaaagaaatggggggcctgggtcagatttttattgtggggtgggatgagtaggacaacatatttcagtaataaaatacagaataaaaatcaagtgtttttaaaaaaaa

SEQ ID NO: 335 - DNA, 1223 bp, Homo sapiens
ccgggagaggaccgagctggaggagctgggtgtggggtgcgttgggctggtggggaggcctagtttgggtgcaagtaggtctgattgagcttgtgttgtgctgaagggacagccctgggtctaggggagagagtccctgagtgtgagacccgccttccccggtcccagcccctcccagttcccccagggacggccacttcctggtccccgacgcaaccatggctgaagaacaaccgcaggtcgaattgttcgtgaaggctggcagtgatggggccaagattgggaactgcccattctcccagagactgttcatggtactgtggctcaagggagtcaccttcaatgttaccaccgttgacaccaaaaggcggaccgagacagtgcagaagctgtgcccagggggggagctcccattcctgctgtatggcactgaagtgcacacagacaccaacaagattgaggaatttctggaggcagtgctgtgccctcccaggtaccccaagctggcagctctgaaccctgagtccaacacagctgggctggacatatttgccaaattttctgcctacatcaagaattcaaacccagcactcaatgacaatctggagaagggactcctgaaagccctgaaggttttagacaattacttaacatcccccctcccagaagaagtggatgaaaccagtgctgaagatgaaggtgtctctcagaggaagtttttggatggcaacgagctcaccctggctgactgcaacctgttgccaaagttacacatagtacaggtggtgtgtaagaagtaccggggattcaccatccccgaggccttccggggagtgcatcggtacttgagcaatgcctacgcccgggaagaattcgcttccacctgtccagatgatgaggagatcgagctcgcctatgagcaagtggcaaaggccctcaaataagcccctcctgggactccctcaaccccctccattttctccacaaaggccctggtggtttccacattgctacccaatggacacactccaaaatggccagtgggcagggaatcctggagcacttgttccgggatggtgtggtggaagaggggatgagggaaagaaatggggggcctgggtcagatttttattgtggggtggggtgagtaggacaacatatttcagtaataaaatacagaataaaaatcaaaaaaaaaaaaaaaaaaaaaaaaaaaaaaaaaa

SEQ ID NO: 336 - DNA, 1820 bp, Homo sapiens
ggggatgcaactaagttgctgagacaagggaagagagatgaggaaccagagcttgtagaaaccactttaatcatatccaggagtttgcaagaaacaggtgcttaacactaattcacctcctgaacaagaaaaatgggctgtgaccggaactgtgggctcatcgctggggctgtcattggtgctgtcctggctgtgtttggaggtattctaatgccagttggagacctgcttatccagaagacaattaaaaagcaagttgtcctcgaagaaggtacaattgcttttaaaaattgggttaaaacaggcacagaagtttacagacagttttggatctttgatgtgcaaaatccacaggaagtgatgatgaacagcagcaacattcaagttaagcaaagaggtccttatacgtacagagttcgttttctagccaaggaaaatgtaacccaggacgctgaggacaacacagtctctttcctgcagcccaatggtgccatcttcgaaccttcactatcagttggaacagaggctgacaacttcacagttctcaatctggctgtggcagctgcatcccatatctatcaaaatcaatttgttcaaatgatcctcaattcacttattaacaagtcaaaatcttctatgttccaagtcagaactttgagagaactgttatggggctatagggatccatttttgagtttggttccgtaccctgttactactacagttggtctgttttatccttacaacaatactgcagatggagtttataaagttttcaatggaaaagataacataagtaaagttgccataatcgacacatataaaggtaaaaggaatctgtcctattgggaaagtcactgcgacatgattaatggtacagatgcagcctcatttccaccttttgttgagaaaagccaggtattgcagttcttttcttctgatatttgcaggtcaatctatgctgtatttgaatccgacgttaatctgaaaggaatccctgtgtatagattcgttcttccatccaaggcctttgcctctccagttgaaaacccagacaactattgtttctgcacagaaaaaattatctcaaaaaattgtacatcatatggtgtgctagacatcagcaaatgcaaagaagggagacctgtgtacatttcacttcctcattttctgtatgcaagtcctgatgtttcagaacctattgatggattaaacccaaatgaagaagaacataggacatacttggatattcaacctataactggattcactttacaatttgcaaaacggctgcaggtcaacctattggtcaagccatcagaaaaaattcaagtattaaagaatctgaagaggaactatattgtgcctattctttggcttaatgagactgggaccattggtgatgagaaggcaaacatgttcagaagtcaagtaactggaaaaataaacctccttggcctgatagaaatgatcttactcagtgttggtgtggtgatgtttgttgcttttatgatttcatattgtgcatgcagatcgaaaacaataaaataagtatgtaccaaaaaatattgcttcaataatattagcttatatattacttgttttcactttatcaaagagaagttacatattaggccatatatatttctagacatgtctagccactgatcatttttaaatataggtaaataaacctataaatattatcacgcagatcactaaagtatatctttaattctgggagaaatgagataaaagatgtacttgtgaccattgtaacaatagcacaataaagcactgtgccaaagttgtccaaaaaa

SEQ ID NO: 337 - DNA, 1942 bp, Homo sapiens
atttgatcctattaagaattgtccaaatgttggagcatttgattgaaaaatccttcttagccattttaaagatagctttccaatgattagacgaattgattctttctgtgactcatcagttcctttcctgtaaaattcatgtcttgctgttgatttgtgaataagaaccagagcttgtagaaaccactttaatcatatccaggagtttgcaagaaacaggtgcttaacactaattcacctcctgaacaagaaaaatgggctgtgaccggaactgtgggctcatcgctggggctgtcattggtgctgtcctggctgtgtttggaggtattctaatgccagttggagacctgcttatccagaagacaattaaaaagcaagttgtcctcgaagaaggtacaattgcttttaaaaattgggttaaaacaggcacagaagtttacagacagttttggatctttgatgtgcaaaatccacaggaagtgatgatgaacagcagcaacattcaagttaagcaaagaggtccttatacgtacagagttcgttttctagccaaggaaaatgtaacccaggacgctgaggacaacacagtctctttcctgcagcccaatggtgccatcttcgaaccttcactatcagttggaacagaggctgacaacttcacagttctcaatctggctgtggcagctgcatcccatatctatcaaaatcaatttgttcaaatgatcctcaattcacttattaacaagtcaaaatcttctatgttccaagtcagaactttgagagaactgttatggggctatagggatccatttttgagtttggttccgtaccctgttactaccacagttggtctgttttatccttacaacaatactgcagatggagtttataaagttttcaatggaaaagataacataagtaaagttgccataatcgacacatataaaggtaaaaggaatctgtcctattgggaaagtcactgcgacatgattaatggtacagatgcagcctcatttccaccttttgttgagaaaagccaggtattgcagttcttttcttctgatatttgcaggtcaatctatgctgtatttgaatccgacgttaatctgaaaggaatccctgtgtatagatttgttcttccatccaaggcctttgcctctccagttgaaaacccagacaactattgtttctgcacagaaaaaattatctcaaaaaattgtacatcatatggtgtgctagacatcagcaaatgcaaagaagggagacctgtgtacatttcacttcctcattttctgtatgcaagtcctgatgtttcagaacctattgatggattaaacccaaatgaagaagaacataggacatacttggatattgaacctataactggattcactttacaatttgcaaaacggctgcaggtcaacctattggtcaagccatcagaaaaaattcaagtattaaagaatctgaagaggaactatattgtgcctattctttggcttaatgagactgggaccattggtgatgagaaggcaaacatgttcagaagtcaagtaactggaaaaataaacctccttggcctgatagaaatgatcttactcagtgttggtgtggtgatgtttgttgcttttatgatttcatattgtgcatgcagatcgaaaacaataaaataagtaagtatgtaccaaaaaatattgcttcaataatattagcttatatattacttgttttcactttatcaaagagaagttacatattaggccatatatatttctagacatgtctagccactgatcatttttaaatataggtaaataaacctataaatattatcacgcagatcactaaagtatatctttaattctgggagaaatgagataaaagatgtacttgtgaccattgtaacaatagcacaaataaagcacttgtgccaaagttgtcc

SEQ ID NO: 338 - DNA, 2216 bp, Homo sapiens
atttgatcctattaagaattgtccaaatgttggagcatttgattgaaaaatccttcttagccattttaaagatagctttccaatgattagacgaattgattctttctgtgactcatcagttcctttcctgtaaaattcatgtcttgctgttgatttgtgaataagaaccagagcttgtagaaaccactttaatcatatccaggagtttgcaagaaacaggtgcttaacactaattcacctcctgaacaagaaaaatgggctgtgaccggaactgtgggctcatcgctggggctgtcattggtgctgtcctggctgtgtttggaggtattctaatgccagttggagacctgcttatccagaagacaattaaaaagcaagttgtcctcgaagaaggtacaattgcttttaaaaattgggttaaaacaggcacagaagtttacagacagttttggatctttgatgtgcaaaatccacaggaagtgatgatgaacagcagcaacattcaagttaagcaaagaggtccttatacgtacagagttcgttttctagccaaggaaaatgtaacccaggacgctgaggacaacacagtctctttcctgcagcccaatggtgccatcttcgaaccttcactatcagttggaacagaggctgacaacttcacagttctcaatctggctgtggcagctgcatcccatatctatcaaaatcaatttgttcaaatgatcctcaattcacttattaacaagtcaaaatcttctatgttccaagtcagaactttgagagaactgttatggggctatagggatccatttttgagtttggttccgtaccctgttactaccacagttggtctgttttatccttacaacaatactgcagatggagtttataaagttttcaatggaaaagataacataagtaaagttgccataatcgacacatataaaggtaaaaggaatctgtcctattgggaaagtcactgcgacatgattaatggtacagatgcagcctcatttccaccttttgttgagaaaagccaggtattgcagttcttttcttctgatatttgcaggtcaatctatgctgtatttgaatccgacgttaatctgaaaggaatccctgtgtatagatttgttcttccatccaaggcctttgcctctccagttgaaaacccagacaactattgtttctgcacagaaaaaattatctcaaaaaattgtacatcatatggtgtgctagacatcagcaaatgcaaagaagggagacctgtgtacatttcacttcctcattttctgtatgcaagtcctgatgtttcagaacctattgatggattaaacccaaatgaagaagaacataggacatacttggatattgaacctataactggattcactttacaatttgcaaaacggctgcaggtcaacctattggtcaagccatcagaaaaaattcaagtattaaagaatctgaagaggaactatattgtgcctattctttggcttaatgagactgggaccattggtgatgagaaggcaaacatgttcagaagtcaagtaactggaaaaataaacctccttggcctgatagaaatgatcttactcagtgttggtgtggtgatgtttgttgcttttatgatttcatattgtgcatgcagatcgaaaacaataaaataaacctggctcaagcacaaaccaatttgtgttgttctgattcaataattggtttctgggtggccaattcagaagaagagtgtacatgctcaacagtctccaggaccatcagtatactgcatttcatgtgcaccaaatattttgaaagacatttataaataattggcttatgactcatatttctctatgaataccttcatacagcaggtataactcttttctttatgggcttaaatattttgtcactgatcctgcaaatggacatcattttagcacactagcggtttatattttaaggaccttcattctctgttctgcacctcttctggaaattgagtaaattttgctttttttttttactcagttgcaacttacgcttggcatcttcagaatgcttttctagcattaagagatgtaaatgataaaggaattattgtatgaaatattacaaagcgtagactatgcattgttattcattataatattttttgctgtcataatcgcctcataaagacaggtttcaaccattaaaatatgttcttcctt

SEQ ID NO: 339 - DNA, 1820 bp, Homo sapiens; identical to SEQ ID NO: 336

SEQ ID NO: 340 - DNA, 1749 bp, Homo sapiens
gaggactgcagtgtaggactttcctgcagaataccatttgatcctattaagaattgtccaaatgttggagcatttgattgaaaaatccttcttagccattttaaagatagctttccaatgattagacgaattgattctttctgtgactcatcagttcatttcctgtaaaattcatgtcttgctgttgatttgtgaataagaaccagagcttgtagaaaccactttaatcatatccaggagtttgcaagaaacaggtgcttaacactaattcacctcctgaacaagaaaaatgggctgtgaccggaactgtgggctcatcgctggggctgtcattggtgctgtcctggctgtgtttggaggtattctaatgccagttggagacctgcttatccagaagacaattaaaaagcaagttgtcctcgaagaaggtacaattgcttttaaaaattgggttaaaacaggcacagaagtttacagacagttttggatctttgatgtgcaaaatccacaggaagtgatgatgaacagcagcaacattcaagttaagcaaagaggtccttatacgtacagagttcgttttctagccaaggaaaatgtaacccaggacgctgaggacaacacagtctctttcctgcagcccaatggtgccatcttcgaaccttcactatcagttggaacagaggctgacaacttcacagttctcaatctggctgtggcagctgcatcccatatctatcaaaatcaatttgttcaaatgatcctcaattcacttattaacaagtcaaaatcttctatgttccaagtcagaactttgagagaactgttatggggctatagggatccatttttgagtttggttccataccctgttactaccacagttggtctgttttatccttacaacaatactgcagatggagtttataaagttttcaatggaaaagataacataagtaaagttgccataatcgacacatataaaggtaaaaggaatctgtcctattgggaaagtcactgcgacatgattaatggtacagatgcagcctcatttccaccttttgttgagaaaagccaggtattgcagttcttttcttctgatatttgcaggtcaatctatgctgtatttgaatccgacgttaatctgaaaggaatccctgtgtatagatttgttcttccatccaaggcctttgcctctccagttgaaaacccagacaactattgtttctgcacagaaaaaattatctcaaaaaattgtacatcatatggtgtgctagacatcagcaaatgcaaagaagggagacctgtgtacatttcacttcctcattttctgtatgcaagtcctgatgtttcagaacctattgatggattaaacccaaatgaagaagaacataggacatacttggatattgaacctataactggattcactttacaatttgcaaaacggctgcaggtcaacctattggtcaagccatcagaaaaaattcaagtattaaagaatctgaagaggaactatattgtgcctattctttggcttaatgagactgggaccattggtgatgagaaggcaaacatgttcagaagtcaagtaactggaaaaataaacctccttggcctgatagaaatgatcttactcagtgttggtgtggtgatgtttgttgcttttatgatttcatattgtgcatgcagatcgaaaacaataaaataagtaagtatgtaccaaaaaaaaaaaaaaaaaaaaaaaaaaaa

SEQ ID NO: 341 - DNA, 3224 bp, Homo sapiens
cagcacatcctaattctatgggaaacaatccttgcttatcggaggtgcatatctaaattcaatagcttaccaatatattcttgggagtaggccaaaaggaaacagaaaacccacattaaaaaaagaagtttcttttcctaaacattttcctgaagctgaaattgaagtggagaggaagtcagttgtcctcgtcgaagtcgtagtcctcctcatcctccccaacctgggacaccggggtcttcaccctggagatgctgtactgagacctgttggagcttgtggccagcatttcatccgcaccattggtcaggtcactggcagagagcctcgtgccgttagacgtggaacctgccgttgtgatgaacacgcctgcaacaattgtctgcgccatttctgtcacgtgtggctccagcgcctttgggaccagacttatggctttttttttttttaagttctgggatacatgtgctgaatgtgcaggattgttacataggtatacatgtgccatggtgctttgctgcacctatcaaaccatcatctaggttttaagccccgtatgccttaatgcattagatatttgagaagaccactttaagtgtatcgttaaataaatagagcttaacttggaatgtcgtcttcttgtggctggcactgaggcaaagaaatgtaatcatctaggaattagacgaattgcattttgagttttggcaggatctggcagtaattttaaagataagctttaaaaagttttgtattaagctcaatattagcatttaatccatttatttgttaaaatctaatattgtattcttgtcttaaacagtgactttgtttttgtaggctgcatcccatatctatcaaaatcaatttgttcaaatgatcctcaattcacttattaacaagtcaaaatcttctatgttccaagtcagaactttgggagaactgttatggggctatagggatccatttttgagtttggttccgtaccctgttactaccacagttggtctgttttatcctgtaagtaccaaatatgaatggcaatattattacattttaatttaattaattcaatggcattggcaaggcataattttataatttagctcattagtcttattgctgatctggagacatatatcctaactttttaaaaagtccacttctcattatagcttcagctttcctagttgggaaattcatctgaatttaacaattaaatttaaacctgaaggatagatttaataaggtttctactcatttataaatacacaatttttttttaaattagccggtaagctagtctgtaaatctttgagcactgtttttggcttttatttccctattcacataatcaagtttaataccatatttttatttgttttaaatatactcctcattcctccttttctagacctcttacaattttaatttatatttaaaagttagcctaatgttcacatctcaatactgataaggtaatagacttcattttaatgggatttgtaaataagaatttttagtagtccataatgtcatgaaatggcagcttgaagattaaggaaaatgtgaacttgatggtgtacttgattaccgcttaatgttttgaattacaaataggataagctaactactgaattggaagttggactatgacttcatttggcactatatgtgaatattatgttctctagttcattgttttacttttagatactgttaggattacaagattatatatcaattataaatgaatgtagaaagccataatgaatcaaattcattctgattttaactcaatactcatagctctttctttggctaatgctttaacttttggatgtctaatttttatcattttagtaaccacttattatcattttagtaaccacttattaatgactgtaacatttagaatacccctagaaatcattgttcttataggtttgttcaatgtccctcacctcaacatagtaagaatagtgatcaaaatgccctcattggcttaattatgacagagtgctagagttcacatcatgtcagcttctgatatgtatcttctttgtcacagcatctagcacttatttctaggcacctttcacaatttttaaggccaataatttaaaaaaatgtattgcagatgtatttcaagtcatttgagtaaccagtgattgagaaatgtgaaagtgagttatgtattgtacaactttgaaaaaatgacttgtagaagtaacattttcccatacatatatttcagtacaacaatactgcagatggagtttataaagttttcaatggaaaagataacataagtaaagttgccataatcgacacatataaaggtaaaaggtaagtattctggtaaaatgtgcatgtatgttactagggtactcttaagcaggaatagtattcatttaacatctcataagacataggcatcaacctatagaacagacctggttataattcagctctggaaactcctgttctgctaggtattaactctttagttgtggtaactggtgagttcacaccagtgcatagctgctgactatcagctccactttaaggtttggttcacctttctgcacaggttatggttgtgttacataaatccccaaagggactattttttcatctctgctacttatccagcattacagtataattattcttacaattagataaccataaatgaaaaggtaaaaaaaaaaaaaaaacaacacatcaactgattgtgtagtagatggaaactttttttttactttttaaatcgagcatatcgaattccatattccagtggcatgacctaaatgtgtctataaagatggaagcttaatgaatccaggcaactgctttcatgaccttccccctgcaaatagtctttaataattttccatattgataactcagcttttttaactttatcaatgcaaaaatagaatgaatatttcaagtgcagttctacaatgtaaatacaaaatgtgaaaatgaagactttgccaactttaaagtggtaaaataacaaatcagcttcctaagccattatttcctttttttttttctagctccagcctattcacctaaagaatttataatttatcatatatgtaaactaggaagaaccctaataaatatcagaggaacaagctttcttctccataaaattaacaattgtgtgtttgactagtttttttctgaaaaagaataaagtgatcaaaacc

SEQ ID NO: 342 - DNA, 2116 bp, Homo sapiens
gattgcatggagacactcaggagcacaaattgcaccacggggttagtccatcacggggttagtccatccaaaagcaaggaggcagcctttggtacccctgtgccagtcaatattcattaaagggcagttttttcaaggaagtcggagctagctgctggacactaacagtcaaatctcaaaggagctgggagagaaatgcacaagcagacagggtcttgctctgttgcccaggctggagtgcagtggcgccatcacagctgctgcaacctcaacctcccaagctcaagtgaatctcccacctcagcctcccaagtagctgggactacagcaaggtttccaagaattacgttggtaggcattcaactggcatcctctggaggtaaccagatgcccagctgctcctggaggggacatatggaagtgggctcataggcggaagggacttgccttgtctcatatgaaactttggactgtggacttttgagttaacgctgaaatgagatagctttccaatgattagacgaattgattctttctgtgactcatcagttcatttcctgtaaaattcatgtcttgctgttgatttgtgaataagaaccagagcttgtagaaaccactttaatcatatccaggagtttgcaagaaacaggtgcttaacactaattcacctcctgaacaagaaaaatgggctgtgaccggaactgtgggctcatcgctggggctgtcattggtgctgtcctggctgtgtttggaggtattctaatgccagttggagacctgcttatccagaagacaattaaaaagcaagttgtcctcgaagaaggtacaattgcttttaaaaattgggttaaaacaggcacagaagtttacagacagttttggatctttgatgtgcaaaatccacaggaagtgatgatgaacagcagcaacattcaagttaagcaaagaggtccttatacgtacagagttcgttttctagccaaggaaaatgtaacccaggacgctgaggacaacacagtctctttcctgcagcccaatggtgccatcttcgaaccttcactatcagttggaacagaggctgacaacttcacagttctcaatctggctgtggcagctgcatcccatatctatcaaaatcaatttgttcaaataatcctcaattcacttattaacaagtcaaaatcttctatgttccaagtcagaactttgagagaactgttatggggctatagggatccatttttgagtttggttccgtaccctgttactaccacagttggtctgttttatccttacaacaatactgcagatggagtttataaagttttcaatggaaaagataacataagtaaagttgccataatcgacacatataaaggtaaaaggaatctgtcctattgggaaagtcactgcgacatgattaatggtacagatgcagcctcatttccaccttttgttgagaaaagccaggtattgcagttcttttcttctgatatttgcaggtcaatctatgctgtatttgaatccgacgttaatctgaaaggaatccctgtgtatagatttgttcttccatccaaggcctttgcctctccagttgaaaacccagacaactattgtttctgcacagaaaaaattatctcaaaaaattgtacatcatatggtgtgctagacatcagcaaatgcaaagaagggagacctgtgtacatttcacttcctcattttctgtatgcaagtcctgatgtttcagaacctattgatggattaaacccaaatgaagaagaacataggacatacttggatattgaacctataactggattcactttacaatttgcaaaacggctgcaggtcaacctattggtcaagccatcagaaaaaattcaagtattaaagaatctgaagaggaactatattgtgcctattctttggcttaatgagactgggaccattggtgatgagaaggcaaacatgttcagaagtcaagtaactggaaaaataaacctccttggcctgatagaaatgatcttactcagtgttggtgtggtgatgtttgttgcttttatgatttcatattgtgcatgcagatcgaaaacaataaaataagtaagtatgtacc

SEQ ID NO: 343 - DNA, 369 bp, Homo sapiens
gtattaagctcaatattagcattaatccatttatttgttaaaatctaatattgtattcttgtcttaaacagtgactttgtttttgtaggctgcatcccatatctatcaaaatcaatttgttcaaatgatcctcaattcacttattaacaagtcaaaatcttctatgttccaagtcagaactttgagagaactgttatggggctatagggatccatttttgagtttggttccgtaccctgttactaccacagttggtctgttttatcctgtaagtaccaaatatgaatggcaatattattacattttaatttaattaattcaatggcattggcaaggcataattttataatttagctcattagctatgct

SEQ ID NO: 344 - DNA, 660 bp, Homo sapiens
tcgaaaacaataaaataaacctggctcaagcacaaaccaatttgtgttgttctgattcaataattggtttctgggtggccaattcagaagaagagtgtacatgctcaacaaatcctaggccctgcattcctgtcatcctcatccgggggaaacaccatcatcccagtagctgccctattcaactgcaacagtctccaggaccatcagtatactgcatttcatgtgcaccaaatattttgaaagacatttataaataattggcttatgactcatatttctctatgaataccttcatacagcaggtataactcttttctttatgggcttaaatattttgtcactgatcctgcaaatggacatcattttagcacactagcggtttatattttaaggaccttcattctctgttctgcacctcttctggaaattgagtaaattttgctttttttttttactcagttgcaacttacgcttggcatcttcagaatgcttttctagcattaagagatgtaaatgataaaggaattattgtatgaaatattacaaagcgtagactatgcattgttattcattataatattttttgctgtcataatcgcctcataaagacaggtttcaaccattaaaatatgttcttccttaaaaaaaaaaaaaaaaaaa

SEQ ID NO: 345 - DNA, 1647 bp, Homo sapiens
gttcctttcctgtaaaattcatgtcttgctgttgatttgtgaataagaaccagagcttgtagaaaccactttaatcatatccaggagtttgcaagaaacaggtgcttaacactaattcacctcctgaacaagaaaaatgggctgtgaccggaactgtgggctcatcgctggggctgtcattggtgctgtcctggctgtgtttggaggtattctaatgccagttggagacctgcttatccagaagacaattaaaaagcaagttgtccgcgaagaaggtacaattgcttttaaaaattgggttaaaacaggcacagaagtttacagacagttttggatctttgatgtgcaaaatccacaggaagtgatgatgaacagcagcaacattcaagttaagcaaagaggtccttatacgtacagagttcgttttctagccaaggaaaatgtaacccaggacgctgaggacaacacagtctctttcctgcagcccaatggtgccatcttcgaaccttcactatcagttggaacagaggctgacaacttcacagttctcaatctggctgtggcagctgcatcccatatctatcaaaatcaatttgttcaaatgatcctcaattcacttattaacaagtcaaaatcttctatgttccaagtcagaactttgagagaactgttatggggctatagggatccatttttgagtttggttccgtaccctgttactaccacagttggtctgttttatccttacaacaatactgcagatggagtttataaagttttcaatggaaaagataacataagtaaagttgccataatcgacacatataaaggtaaaaggaatctgtccgattgggaaagtcactgcgacatgattaatggtacagatgcagcctcatttccaccttttgttgagaaaagccaggtattgcagttcttttcttctgatatttgcaggtcaatctatgctgtatttgaatccgacgttaatctgaaaggaatccctgtgtatagatttgttcttccatccaaggcctttgcctctccagttgaaaacccagacaactattgtttctgcacagaaaaaattatctcaaaaaattgtacatcatatggtgtgctagacatcagcaaatgcaaagaagggagacctgtgtacatttcacttcctcattttctgtatgcaagtcctgatgtttcagaacctattgatggattaaacccaaatgaagaagaacataggacatacttggatattgaacctataactggattcactttacaatttgcaaaacggctgcaggtcaacctattggtcaagccatcagaaaaaattcaagtattaaagaatctgaagaggaactatattgtgcctattctttggcttaatgagactgggaccattggtgatgagaaggcaaacatgttcagaagtcaagtaactggaaaaataaacctccttggcctgatagaaatgatcttactcagtgttggtgtggtgatgtttgttgcttttatgatttcatattgtgcatgcagatcgaaaacaataaaataagtaagtatgtaccaaaaaatattgcttcaataatattagcttatatattacttgttttcactttatcaagagagaaggttacatattaggcc

SEQ ID NO: 346 - DNA, 1870 bp, Homo sapiens
gaaaaatccttcttagccattttaaagatagctttccaatgattagacgaattgattctttctgtgactcatcagttcctttcctgtaaaattcatgtcttgctgttgatttgtgaataagaaccagagcttgtagaaaccactttaatcatatccaggagtttgcaagaaacaggtgcttaacactaattcacctcctgaacaagaaaaatgggctgtgaccggaactgtgggctcatcgctggggctgtcattggtgctgtcctggctgtgtttggaggtattctaatgccagttggagacctgcttatccagaagacaattaaaaagcaagttgtcctcgaagaaggtacaattgcttttaaaaattgggttaaaacaggcacagaagtttacagacagttttggatctttgatgtgcaaaatccacaggaagtgatgatgaacagcagcaacattcaagttaagcaaagaggtccttatacgtacagagttcgttttctagccaaggaaaatgtaacccaggacgctgaggacaacacagtctctttcctgcagcccaatggtgccatcttcgaaccttcactatcagttggaacagaggctgacaacttcacagttctcaatctggctgtggcagctgcatcccatatctatcaaaatcaatttgttcaaatgatcctcaattcacttattaacaagtcaaaatcttctatgttccaagtcagaactttgagagaactgttatggggctatagggatccatttttgagtttggttccgtaccctgttactaccacagttggtctgttttatccttacaacaatactgcagatggagtttataaagttttcaatggaaaagataacataagtaaagttgccataatcgacacatataaaggtaaaaggaatctgtcctattgggaaagtcactgcgacatgattaatggtacagatgcagcctcatttccaccttttgttgagaaaagccaggtattgcagttcttttcttctgatatttgcaggtcaatctatgctgtatttgaatccgacgttaatctgaaaggaatccctgtgtatagatttgttcttccatccaaggcctttgcctctccagttgaaaacccagacaactattgtttctgcacagaaaaaattatctcaaaaaattgtacatcatatggtgtgctagacatcagcaaatgcaaagaagggagacctgtgtacatttcacttcctcattttctgtatgcaagtcctgatgtttcagaacctattgatggattaaacccaaatgaagaagaacataggacatacttggatattgaacctataactggattcactttacaatttgcaaaacggctgcaggtcaacctattggtcaagccatcagaaaaaattcaagtattaaagaatctgaagaggaactatattgtgcctattctttggcttaatgagactgggaccattggtgatgagaaggcaaacatgttcagaagtcaagtaactggaaaaataaacctccttggcctgatagaaatgatcttactcagtgttggtgtggtgatgtttgttgcttttatgatttcatattgtgcatgcagatcgaaaacaataaaataagtatgtaccaaaaaatattgcttcaataatattagcttatatattacttgttttcactttatcaaagagaagttacatattaggccatatatatttctagacatgtctagccactgatcatttttaaatataggtaaataaacctataaatattatcacgcagatcactaaagtatatctttaattctgggagaaatgagataaaagatgtacttgtgaccattgtaacaatagcacaaat

SEQ ID NO: 347 - DNA, 653 bp, Homo sapiens
acaggacacagctgggttctgaagcttctgagttctgcagcctcaccctctgagaaaacctcttttccaccaataccatgaagctctgcgtgactgtcctgtctctcctcatgctagtagctgccttctgctctccagcgctctcagcaccaatgggctcagaccctcccaccgcctgctgcttttcttacacccgagaagcttcctcgaactttgtggtagattactatgagaccagcagcctctgctcccagccagctgtggtattccaaaccaaaagaagcaagcaagtctgtgctgatcccagtgaatcctgggtccaggagtacgtgtatgacctggaactgaactgagctgctcagagacaggaagtcttcagggaaggtcacctgagcccggatgcttctccatgagacacatctcctccatactcaggactcctctccgcagttcctgtcccttctcttaatttaatcttttttatgtgccgtgttattgtattaggtgtcatttccattatttatattagtttagccaaaggataagtgtcccctatggatggtccactgtcactgtttctctgctgttgcaaatacatggataacacatttgattcgtgtgtgttttcataataaaactttaaaataaaatgc

SEQ ID NO: 348 - DNA, 565 bp, Homo sapiens
gctgtgtcctgtctctcctcatgctagtagctgccttctgctctccagcgctctcagcaccaatgggctcagaccctcccaccgcctgctgcttttcttacaccgcgaggaagcttcctcgcaactttgtggtagattactatgagaccagcatcctctgctcccagccagctgtggtattccaaaccaaaagaagcaagcaagtctgtgctgatcccagtgagacctgggtccaggagtacgtgtatgacctggaactgaactgagctgctcagagacaggaagtcttcagggaaggtcacctgagcccggatgcttctccatgagacacatctcctccatactcaggactcctctccgcagttcctgtcccttctcttaatttaatcttttttatgtgccgtgttattgtattaggtgtcatttccattatttatattagtttagccaaaggataagagacccctatgggatggtccactgtcactgtttctctgctgttgcaaatacatggataacacatttgattctgtgtgttttcataataaaactttaaaataaaagc

SEQ ID NO: 349 - DNA, 696 bp, Homo sapiens
ttccccccccccccccccccccccgcccgagcacaggacacagctgggttctgaagcttctgagttctgcagcctcacctctgagaaaacctcttttccaccaataccatgaagctctgcgtgactgtcctgtctctcctcatgctagtagctgccttctgctctccagcgctctcagcaccaatgggctcagaccctcccaccgcctgctgcttttcttacaccgcgaggaagcttcctcgcaactttgtggtagattactatgagaccagcagcctctgctcccagccagctgtggtattccaaaccaaaagaagcaagcaagtctgtgctgatcccagtgaatcctgggtccaggagtacgtgtatgacctggaactgaactgagctgctcagagacaggaagtcttcagggaaggtcacctgagcccggatgcttctccatgagacacatctcctccatactcaggactcctctccgcagttcctgtcccttctcttaatttaatcttttttatgtgccgtgttattgtattaggtgtcatttccattatttatattagtttagccaaaggataagtgtcctatggggatggtccactgtcactgtttctctgctgttgcaaatacatggataacacatttgattctgtgtgttttccataataaaactttaaaataaaatgcagacagtta

SEQ ID NO: 350 - DNA, 696 bp, Homo sapiens; identical to SEQ ID NO: 349

SEQ ID NO: 351 - DNA, 640 bp, Homo sapiens
gaattccgctgggttctgaagcttctgagttctgcagcctcacctctgagaaaacctcttttccaccaataccatgaagctctgcgtgactgtcctgtctctcctcatgctagtagctgccttctgctctctagcactctcagcaccaatgggctcagaccctcccaccgcctgctgcttttcttacaccgcgaggaagcttcctcgcaactttgtggtagattactatgagaccagcagcctctgctcccagccagctgtggtattccaaaccaaaagaagcaagcaagtctgtgctgatcccagtgaatcctgggtccaggagtacgtgtatgacctggaactgaactgagctgctcagagacaggaagtcttcagggaaggtcacctgagcccggatgcttctccatgagacacatctcctccatactcaggactcctctccgcagttcctgtcccttctcttaatttaatcttttttatgtgccgtgttattgtattaggtgtcatttccattatttatattagtttagccaaaggataagtgtcccctatggggatggtccactgtcactgtttctctgctgttgcaaatacatggataacacatttgattctgtgtgttttcataataaaactt

SEQ ID NO: 352 - DNA, 1798 bp, Homo sapiens
ctgggttctgaagcttctgagttctgcagcctcacctctgagaaaacctcttttccaccaataccatgaagctctgcgtgactgtcctgtctctcctcatgctagtagctgccttctgctctccagcgctctcagcaccaagtaagtctacttttgcagctgctatttcaagtcaaggtgtaggcagagtccttttttctagtcatggctggcaaacagtgggatctggggatgggacaaaaggcagctaggaagattgccatgtagtctgctgctaaatgtagagtctagtagatattcaataacattcaagttcctattttcttaagaattagcaaccagcagaggaaaacgatgggctggaagtcagactgttgaattggctctgcctttaattatttgttcaagcaagcccctgtccctctctgtgccttggtttccccatctgtcatatgaagggagtgcgatgtgttctgagactgaatccagttccaatcttctagatttctttctcgttcttctctgaagatccactattcaaaataagactcctgctcatgttaggtgggaatggatatttggggttctggtagctccacagggatgctcaatgaagatgcaaaattagaagtcaaaataaacagctcccacgggcagtgttgatctcaccctggcctttcctttcagtgggctcagaccctcccaccgcctgctgcttttcttacaccgcgaggaagcttcctcgcaactttgtggtagattactatgagaccagcagcctctgctcccagccagctgtggtgtgagtatcaacccctgggctgccctgggaggcaagggtgagggctggattttaaaagagggcctgttttggggagggggtgattgagcgttggggaggcagctcccagggctgaagccttccctgagagcagtgaggacacaggtcatgaactcacttttcaagtgctgaaggcggcagagtgggagccgagagagaagggggttcctggggaggaagttattcagaggacagggaagcaggggaaggcagacaggtcccgtgagatatggaccgattccttaaaccgtgctagaaagacatgtggaaaagtcactgccaggctggcagggaatggggagatctattcatattgattgcaatgcccattggttcctaatctgggcaactcctggggcccacagctaaatccagtgggtggaagttacagggagtctgcttccagtgctgctccaggaaggatcccatccaccagagctgccccacatggaccatggtcaggcagaggaagatgcaaaggataaagccagatgacctcaaaggtcccatgggattctaatctgtccgctccttgttctacagattccaaaccaaaagaagcaagcaagtctgtgctgatcccagtgagacctgggtccaggagtacgtgtatgacctggaactgaactgagctgctcagagacaggaagtcttcagggaaggtcacctgagcccggatgcttctccatgagacacatctcctccatactcaggactcctctccgcagttcctgtcccttctcttaatttaatcttttttatgtgccgtgttattgtattaggtgtcatttccattatttatattagtttagccaaaggataagtgtcccctatggggatggtccactgtcactgtttctctgctgttgcaaatacatggataacacatttgattctgtgtgttttcataataaaactttaaaataaaatgcaaaaaaaaaaaaaaaaaaaaaaaaa

SEQ ID NO: 353 - DNA, 637 bp, Homo sapiens
cttctgagttctgcagcctcacctctgagaaaacctcttttcgaccaataccatgaagctctgcgtgactgtcctgtctctcctcatgctagtagctgccttctgctctccagcgctctcagcaccaatgggctcagaccctcccaccgcctgctgcttttcttacaccgcgaggaagcttcctcgcaactttgtggtagattactatgagaccagcagcctctgctcccagccagctgtggtattccaaaccaaaagaagcaagcaagtctgtgctgatcccagtgaatcctgggtccaggagtacgtgtatgacctggaactgaactgagctgctcagagacaggaagtcttcagggaaggtcacctgagcccggatgcttctccatgagacacatctcctccatactcaggactcctctccgcagttcctgtcccttctcttaatttaatcttttttatgtgccgtgttattgtattaggtgtcatttccattatttatattagtttagccaaaggataagtgtcccctatggggatggtccactgtcactgtttctctgctgttgcaaatacatggataacacatttgattctgtgtgttttcataataaaactttaaaataaaatgcagaat

SEQ ID NO: 354 - DNA, 663 bp, Homo sapiens
gctgggttctgaagcttctgagttctgcagcctcacctctgagaaaacctcttttccaccaataccatgaagctctgcgtgactgtcctgtctctcctcatgctagtagctgccttctgctctccagcgctctcagcaccaatgggctcagaccctcccaccgcctgctgcttttcttacaccgcgaggaagcttcctcgcaactttgtggtagattactatgagaccagcagcctctgctcccagccagctgtggtattccaaaccaaaagaagcaagcaagtctgtgctgatcccagtgaatcctgggtccaggagtacgtgtatgacctggaactgaactgagctgctcagagacaggaagtcttcagggaaggttcacctgagccggagtcctctcctaggaaaatcctcatctcagactcctctcgcagtcctgtcccttctcttaatttaatctttttatgtgccgtgttattgtattaggtgtcatttccattatttatattagtttagccaaaggataagtgctatggggatggtccactgtcactgtttctctgctgttgcaaatacatggataacacatttgattctgtgtgttttcataataaaaaattaaaataatggaaatgaacaacctaatacaataacacggcacat

SEQ ID NO: 355 - DNA, 2232 bp, Homo sapiens
cttccccttctctgccctgctccaggcaccaggctctttccccttcagtgtctcagaggaggggacggcagcaccatggacccccgcttgtccactgtccgccagacctgctgctgcttcaatgtccgcatcgcaaccaccgccctggccatctaccatgtgatcatgagcgtcttgttgttcatcgagcactcagtagaggtggcccatggcaaggcgtcctgcaagctctcccagatgggctacctcaggatcgctgacctgatctccagcttcctgctcatcaccatgctcttcatcatcagcctgagcctactgatcggcgtagtcaagaaccgggagaagtacctgctgcccttcctgtccctgcaaatcatggactatctcctgtgcctgctcaccctgctgggctcctacattgagctgcccgcctacctcaagttggcctcccggagccgtgctagctcctccaagttccccctgatgacgctgcagctgctggacttctgcctgagcatcctgaccctctgcagctcctacatggaagtgcccacctatctcaacttcaagtccatgaaccacatgaattacctccccagccaggaggatatgcctcataaccagttcatcaagatgatgatcatcttttccatcgccttcatcactgtccttatcttcaaggtctacatgttcaagtgcgtgtggcggtgctacagattgatcaagtgcatgaactcggtggaggagaagagaaactccaagatgctccagaaggtggtcctgccgtcctacgaggaagccctgtctttgccatcgaagaccccagaggggggcccagcaccacccccatactcagaggtgtgaccctcgccaggccccagccccagtgctgggaggggtggagctgcctcataatctgcttttttgctttggtggcccctgtggcctgggtgggccctcccgcccctccctggcaggacaatctgcttgtgtctccctcgctggcctgctcctcctgcagggcctgtgagctgctcacaactgggtcaacgctttaggctgagtcactcctcgggtctctccataattcagcccaacaatgcttggtttatttcaatcagctctgacacttgtttagacgattggccattctaaagttggtgagtttgtcaagcaactatcgacttgatcagttcagccaagcaactgacaaatcaaaaacccacttgtcagttcagtaaaataatttggtcaaacaacagtctattgcattgatttataaatagttgtcagttcacatagcaatttaatcaagtaatcattaattagttaccccctatatataaatatatgtaatcaatttcttcaaatagcttgcttacatgataatcaattagccaaccatgagtcatttagaatagtgataaatagaatacacagaatagtgatgaaattcaatttaaaaaatcacgttagcctccaaaccatttaattcaaatgaacccatcaactggatgccaactctggcgaatgtaggacctctgagtggctgtataattgttaattcaaatgaaattcatttaaacagttgacaaactgtcattcaacaattagctccaggaaataacagttatttcatcataaaacagtcccttcaaacacacaattgttctgctgaagagttgtcatcaacaatccaatgctcacctattcagttgctctgtggtcagtgtggctgcatagcagtggattccatgaaaggagtcattttagtgatgagctgccagtccattcccaggccaggctgtcgctggccatccattcagtcgattcagtcataggcgaatctgttctgcccgaggcttgtggtcaagcaaaaattcagccctgaaatcaggcacatctgttcgttggactaaacccacaggttagttcagtcaaagcaggcaacccccttgtgggcactgaccctgccactggggtcatggcggttgtggcagctggggaggtttggccccaacagccctcctgtgcctgcttccctgtgtgtcggggtcctccagggagctgacccagaggtggaggccacggaggcagggtctctggggactgtcggggggtacagagggagaaggctctgcaagagctccctggcaatacccccttgtgtaattgctttgtgtgcgacagggaggaagtttcaataaagcaacaacaagcttcaaggaattc

SEQ ID NO: 356 - DNA, 2187 bp, Homo sapiens
cagaggaggggacggcagcaccatggacccccgcttgtccactgtccgccagacctgctgctgcttcaatgtccgcatcgcaaccaccgccctggccatctaccatgtgatcatgagcgtcttgttgttcatcgagcactcagtagaggtggcccatggcaaggcgtcctgcaagctctcccagatgggctacctcaggatcgctgacctgatctccagcttcctgctcatcaccatgctcttcatcatcagcctgagcctactgatcggggtagtcaagaaccgggagaagtacctgctgcccttcctgtccctgcaaatcatggactatctcctgtgcctgctcacactgctgggctcctacattgagctgcccgcctacctcaagttggcctcccggagccgtgctagctcctccaagttccccctgatgacgctgcagctgctggacttctgcctgagcatcctgaccctctgcagctcctacatggaagtgcccacctatctcaacttcaagtccatgaaccacatgaattacctccccagccaggaggatatgcctcataaccagttcatcaagatgatgatcatcttttccatcgccttcatcactgtccttatcttcaaggtctacatgttcaagtgcgtgtggcggtgctacagattgatcaagtgcatgaactcggtggaggagaagagaaactccaagatgctccagaaggtggtcctgccgtcctacgaggaagccctgtctttgccatcgaaggacccagagggggggccagcaccacccccatactcagaggtgtgaccctcggcagggcccaggcccagtgttgggaggggtggagctgcctcataatctgcttttttggtttggtggcccctgtggcctgggtgggccctcccgcccctccctggcaggacaatctgcttgtgtctccctcgctggcctgctcctcctgcaggggctgtgagctgctcacaactgggtcaacgctttaggctgagtcactcctcgggtctctccataattcagcccaacaatgtttggtttatttcaatcagctctgacacttgtttagacgattgggcattctaaagttggtgagtttgtcaagcaactatcgacttgatcagttcagcaagcaactgacaaatcaaaaacccacttgtcagttcaataaaataatttgggcaaacaacagactattggattgatttataaataggtggcagttcacataggaatttaatcaagtaatcattaattagttaccccctatatataaatatatgtaatcaatttcttcaaatagcttggttacatgataatcaattagccaaccatgagtcatttagaatagtgataaatagaatacacagaatagtgatgaaattcaatttaaaaaatcacgttagcctccaaaccatttaattcaaatgaacccatcaactggatgccaactctggcgaatgtaggacctctgagtgggtgtataattgttaattcaaatgaaattcatttaaacagttgacaaactgtcattcaacaattaggtccaggaaataacagttatttcatcataaaacagtcccttcaaacacacaattggtctgctgaagggttgtcatcaacaatccaatgctcacctattcagttgctctgtggtcagtgtggctgcataacagtggattccatgaaaggagtcattttagtgatgagctgccagtccattcccaggccaggctgtcgctggccatccattcagtcgattcagtcataggcgaatctgttctgcccgaggcttgtggtcaagcaaaaattcagccctgaaatcaggcacatctgttcggtggactaaacccacaggttagttcagtcaaagcagggaacccccttgtgggcactgaccctgccactggggtcatggcggttgtgacagctggggaggtttgcccccaacagccctcctgtgcctgcttccctgtgtgtcggggtcctccagggagctgacccagaggtggaggccacggaggcagggtctctggggactgtcggggggtacagagggagaaggctcttcaagagctccctggcaatacccccttgtgtaattgctttgtgtgcgacagggaggaagtttcaataaagcagcaacaagcttccaaaaaaaaaaaaaaaaa

SEQ ID NO: 357 - DNA, 2169 bp, Homo sapiens
agaggaggggacggcagcaccatggacccccgcttgtccactgtccgccagacctgctgctgcttcaatgtccgcatcgcaaccaccgccctggccatctaccatgtgatcatgagcgtcttgttgttcatcgagcactcggtagaggtggcccatggcaaggcgtcctgcaagctctcccagatgggctacctcaggatcgctgacctgatctccagcttcctgctcatcaccatgctcttcatcatcagcctgagcctactgatcggcgtagtcaagaaccgggagaagtacctgctgcccttcctgtccctgcaaatcatggactatctcctgtgcctgctcaccctgctgggctcctacattgagctgcccgcctacctcaagttggcctcccggagccgtgctagctcctccaagttccccctgatgacgctgcagctgctggacttctgcctgagcatcctgaccctctgcagctcctacatggaagtgcccacctatctcaacttcaagtccatgaaccacatgaattacctccccagccaggaggatatgcctcataaccagttcatcaagatgatgatcatcttttccatcgccttcatcactgtccttatcttcaaggtctacatgttcaagtgcgtgtggcggtgctacagattgatcaagtgcatgaactcggtggaggagaagagaaactccaagatgctccagaaggtggtcctgccgtcctacgaggaagccctgtctttgccatcgaagaccccagaggggggcccagcaccacccccatactcagaggtgtgaccctcgccaggccccagccccagtgctgggaggggtggagctgcctcataatctgcttttttgctttggtggcccctgtggcctgggtgggccctcccgcccctccctggcaggacaatctgcttgtgtctccctcgctggcctgctcctcctgcagggcctgtgagctgctcacaactgggtcaacgctttaggctgagtcactcctcgggtctctccataattcagcccaacaatgcttggtttatttcaatcagctctgacacttgtttagacgattggccattctaaagttggtgagtttgtcaagcaactatcgacttgatcagttcagccaagcaactgacaaatcaaaaacccacttgtcagttcagtaaaataatttggtcaaacaacagtctattgcattgatttataaatagttgtcagttcacatagcaatttaatcaagtaatcattaattagttaccccctatatataaatatatgtaatcaatttcttcaaatagcttgcttacatgataatcaattagccaaccatgagtcatttagaatagtgataaatagaatacacagaatagtgatgaaattcaatttaaaaaatcacgttagcctccaaaccatttaattcaaatgaacccatcaactggatgccaactctggcgaatgtaggacctctgagtggctgtataattgttaattcaaatgaaattcatttaaacagttgacaaactgtcattcaacaattagctccaggaaataacagttatttcatcataaaacagtcccttcaaacacacaattgttctgctgaagagttgtcatcaacaatccaatgctcacctattcagttgctctgtggtcagtgtggctgcatagcagtggattccatgaaaggagtcattttagtgatgagctgccagtccattcccaggccaggctgtcgctggccatccattcagtcgattcagtcataggcgaatctgttctgcccgaggcttgtggtcaagcaaaaattcagccctgaaatcaggcacatctgttcgttggactaaacccacaggttagttcagtcaaagcaggcaacccccttgtgggcactgaccctgccactggggtcatggcggttgtggcagctggggaggtttggccccaacagccctcctgtgcctgcttccctgtgtgtcggggtcctccagggagctgacccagaggtggaggccacggaggcagggtctctggggactgtcggggggtacagagggagaaggctctgcaagagctccctggcaatacccccttgtgtaattgctttgtgtgcgacagggaggaagtttcaataaagcagcaacaagcttc

SEQ ID NO: 358 - DNA, 2232 bp, Homo sapiens; identical to SEQ ID NO: 355

SEQ ID NO: 359 - DNA, 2776 bp, Homo sapiens
cagggcagactggtagcaaagcccccacgcccagccaggagcaccgccgcggactccagcacaccgagggacatgctgggcctgcgccccccactgctcgccctggtggggctgctctccctcgggtgcgtcctctctcaggagtgcacgaagttcaaggtcagcagctgccgggaatgcatcgagtcggggcccggctgcacctggtgccagaagctgaacttcacagggccgggggatcctgactccattcgctgcgacacccggccacagctgctcatgaggggctgtgcggctgacgacatcatggaccccacaagcctcgctgaaacccaggaagaccacaatgggggccagaagcagctgtccccacaaaaagtgacgctttacctgcgaccaggccaggcagcagcgttcaacgtgaccttccggcgggccaagggctaccccatcgacctgtactatctgatggacctctcctactccatgcttgatgacctcaggaatgtcaagaagctaggtggcgacctgctccgggccctcaacgagatcaccgagtccggccgcattggcttcgggtccttcgtggacaagaccgtgctgccgttcgtgaacacgcaccctgataagctgcgaaacccatgccccaacaaggagaaagagtgccagcccccgtttgccttcaggcacgtgctgaagctgaccaacaactccaaccagtttcagaccgaggtcgggaagcagctgatttccggaaacctggatgcacccgagggtgggctggacgccatgatgcaggtcgccgcctgcccggaggaaatcggctggcgcaacgtcacgcggctgctggtgtttgccactgatgacggcttccatttcgcgggcgacggaaagctgggcgccatcctgacccccaacgacggccgctgtcacctggaggacaacttgtacaagaggagcaacgaattcgactacccatcggtgggccagctggcgcacaagctggctgaaaacaacatccagcccatcttcgcggtgaccagtaggatggtgaagacctacgagaaactcaccgagatcatccccaagtcagccgtgggggagctgtctgaggactccagcaatgtggtccatctcattaagaatgcttacaataaactctcctccagggtcttcctggatcacaacgccctccccgacaccctgaaagtcacctacgactccttctgcagcaatggagtgacgcacaggaaccagcccagaggtgactgtgatggcgtgcagatcaatgtcccgatcaccttccaggtgaaggtcacggccacagagtgcatccaggagcagtcgtttgtcatccgggcgctgggcttcacggacatagtgaccgtgcaggttcttccccagtgtgagtgccggtgccgggaccagagcagagaccgcagcctctgccatggcaagggcttcttggagtgcggcatctgcaggtgtgacactggctacattgggaaaaactgtgagtgccagacacagggccggagcagccaggagctggaaggaagctgccggaaggacaacaactccatcatctgctcagggctgggggactgtgtctgcgggcagtgcctgtgccacaccagcgacgtccccggcaagctgatatacgggcagtactgcgagtgtgacaccatcaactgtgagcgctacaacggccaggtctgcggcggcccggggagggggctctgcttctgcgggaagtgccgctgccacccgggctttgagggctcagcgtgccagtgcgagaggaccactgagggctgcctgaacccgcggcgtgttgagtgtagtggtcgtggccggtgccgctgcaacgtatgcgagtgccattcaggctaccagctgcctctgtgccaggagtgccccggctgcccctcaccctgtggcaagtacatctcctgcgccgagtgcctgaagttcgaaaagggcccctttgggaagaactgcagcgcggcgtgtccgggcctgcagctgtcgaacaaccccgtgaagggcaggacctgcaaggagagggactcagagggctgctgggtggcctacacgctggagcagcaggacgggatggaccgctacctcatctatgtggatgagagccgagagtgtgtggcaggccccaacatcgccgccatcgtcgggggcaccgtggcaggcatcgtgctgatcggcattctcctgctggtcatctggaaggctctgatccacctgagcgacctccgggagtacaggcgctttgagaaggagaagctcaagtcccagtggaacaatgataatccccttttcaagagcgccaccacgacggtcatgaaccccaagtttgctgagagttaggagcacttggtgaagacaaggccgtcaggacccaccatgtctgccccatcacgcggccgagacatggcttggccacagctcttgaggatgtcaccaattaaccagaaatccagttattttccgccctcaaaatgacagccatggccggccggtgcttctgggggctcgtcggggggacagctccactctgactggcacagtctttgcatggagacttgaggagggcttgaggttggtgaggttaggtgcgtgtttcctgtgcaagtcaggacatcagtctgattaaaggtggtgccaatttatttacatttaaacttgtcagggtataaaatgacatcccattaattatattgttaatcaatcacgtgtatagaaaaaaaaataaaacttcaat

SEQ ID NO: 360 - DNA, 2776 bp, Homo sapiens; identical to SEQ ID NO: 359

SEQ ID NO: 361 - DNA, 2797 bp, Homo sapiens
ggcacgagggttgggcctgagaccgtcaccaagaccccttccctccacaggacatgctgggcctgcgccccccacttctcgccctggtggggctgctctccctcgggtgcgtcctctctcaggagtgcacgaagttcaaggtcagcagctgccgggaatgcatcgagtcggggcccggctgcacctggtgccagaagctgaacttcacagggccgggggatcctgactccattcgctgcgacacccggccacagctgctcatgaggggctgtgcggctgacgacatcatggaccccacaagcctcgctgaaacccaggaagaccacaatgggggccagaagcagctgtccccacaaaaagtgacgctttacctgcgaccaggccaggcagcagcgttcaacgtgaccttccggcgggccaagggctaccccatcgacctgtactatctgatggacctctcctactccatgcttgatgacctcaggaatgtcaagaagctaggtggcgacctgctccgggccctcaacgagatcaccgagtccggccgcattggcttcgggtccttcgtggacaagaccgtgctgccgttcgtgaacacgcaccctgataagctgcgaaacccatgccccaacaaggagaaagagtgccagcccccgtttgccttcaggcacgtgctgaagctgaccaacaactccaaccagtttcagaccgaggtcgggaagcagctgatttccggaaacctggatgcacccgagggtgggctggacgccatgatgcaggtcgccgcctgcccggaggaaatcggctggcgcaacgtcacgcggctgctggtgtttgccactgatgacggcttccatttcgcgggcgacgggaagctgggcgccatcctgacccccaacgacggccgctgtcacctggaggacaacttgtacaagaggagcaacgaattcgactacccatcggtgggccagctggcgcacaagctggctgaaaacaacatccagcccatcttcgcggtgaccagtaggatggtgaagacctacgagaaactcaccgagatcatccccaagtcagccgtgggggagctgtctgaggactccagcaatgtggtccatctcattaagaatgcttacaataaactctcctccagggtattcctggatcacaacgccctccccgacaccctgaaagtcacctacgactccttctgcagcaatggagtgacgcacaggaaccagcccagaggtgactgtgatggcgtgcagatcaatgtcccgatcaccttccaggtgaaggtcacggccacagagtgcatccaggagcagtcgtttgtcatccgggcgctgggcttcacggacatagtgaccgtgcaggtccttccccagtgtgagtgccggtgccgggaccagagcagagaccgcagcctctgccatggcaagggcttcttggagtgcggcatctgcaggtgtgacactggctacattgggaaaaactgtgagtgccagacacagggccggagcagccaggagctggaaggaagctgccggaaggacaacaactccatcatctgctcagggctgggggactgtgtctgcgggcagtgcctgtgccacaccagcgacgtccccggcaagctgatatacgggcagtactgcgagtgtgacaccatcaactgtgagcgctacaacggccaggtctgcggcggcccggggagggggctctgcttctgcgggaagtgccgctgccacccgggctttgagggctcagcgtgccagtgcgagaggaccactgagggctgcctgaacccgcggcgtgttgagtgtagtggtcgtggccggtgccgctgcaacgtatgcgagtgccattcaggctaccagctgcctctgtgccaggagtgccccggctgcccctcaccctgtggcaagtacatctcctgcgccgagtgcctgaagttcgaaaagggcccctttgggaagaactgcagcgcggcgtgtccgggcctgcagctgtcgaacaaccccgtgaagggcaggacctgcaaggagagggactcagagggctgctgggtggcctacacgctggagcagcaggacgggatggaccgctacctcatctatgtggatgagagccgagagtgtgtggcaggccccaacatcgccgccatcgtcgggggcaccgtggcaggcatcgtgctgatcggcattctcctgctggtcatctggaaggctctgatccacctgagcgacctccgggagtacaggcgctttgagaaggagaagctcaagtcccagtggaacaatgataatccccttttcaagagcgccaccacgacggtcatgaaccccaagtttgctgagagttaggagcacttggtgaagacaaggccgtcaggacccaccatgtctgccccatcacgcggccgagacatggcttgccacagctcttgaggatgtcaccaattaaccagaaatccagttattttccaccctcaaaatgacagccatggccggccgggtgcttctgggggctcgtcggggggacagctccactctgactggcacagtctttgcatggagacttgaggagggagggcttgaggttggtgaggttaggtgcgtgtttcctgtgcaagtcaggacatcagtctgattaaaggtggtgccaatttatttacatttaaacttgtcagggtataaaatgacatcccattaattatattgttaatcaatcacgtgtatagaaaaaaaataaaacttcaatacaggctgtccatggaaaaaaaaaaaaaaaaaaaaaa

SEQ ID NO: 362 - DNA, 2200 bp, Homo sapiens
gcccccacgcccagccaggagcaccgccgaggactccagcacaccgagggacatgctgggcctgcgccccccactgctcgccctggtggggctgctctccctcgggtgcgtcctctctcaggagtgcacgaagttcaaggtcagcagctgccgggaatgcatcgagtcggggcccggctgcacctggtgccagaagctgaacttcacagggccgggggatcctgactccattcgctgcgacacccggccacagctgctcatgaggggctgtgcggctgacgacatcatggaccccacaagcctcgctgaaacccaggaagaccacaatgggggccagaagcagctgtccccacaaaaagtgacgctttacctgcgaccaggcttcgggtccttcgtggacaagaccgtgctgccgttcgtgaacacgcaccctgataagctgcgaaacccatgccccaacaaggagaaagagtgccagcccccgtttgccttcaggcacgtgctgaagctgaccaacaactccaaccagtttcagaccgaggtcgggaagcagctgatttccggaaacctggatgcacccgagggtgggctggacgccatgatgcaggtcgccgcctgcccggaggaaatcggctggcgcaacgtcacgcggctgctggtgtttgccactgatgacggcttccatttcgcgggcgacgggaagctgggcgccatcctgacccccaacgacggccgctgtcacctggaggacaacttgtacaagaggagcaacgaattcgactacccatcggtgggccagctggcgcacaagctggctgaaaacaacatccagcccatcttcgcggtgaccagtaggatggtgaagacctacgagaaactcaccgagatcatccccaagtcagccgtgggggagctgtctgaggactccagcaatgtggtccatctcattaagaatgcttacaataaactctcctccagggtattcctggatcacaacgccctccccgacaccctgaaagtcacctacgactccttctgcagcaatggagtgacgcacaggaaccagcccagagtggactgtgatggcgtgcagatcaatgtcccgatcaccttccaggtgaaggtcacggccacagagtgcatccaggagcagtcgtttgtcatcgggcgctgggcttcacggacatagtgaccgtgcaggtccttccccagtgtgagtgccggtgccgggaccagagcagagaccgcagcctctgccatggaaagggcttcttggagtgcggcatctgcaggtgtgacactggctacattgggaaaaactgtgagtgccagacacagggccggagcagccaggagctggaaggaagctgccggaaggacaacaactccatcatctgctcagggctgggggactgtgtctgcgggcagtgcctgtgccacaccagcgacgtccccggcaagctgatatacgggcagtactgcgagtgtgacaccatcaactgtgagcgctacaacggccaggtctgcggcggcccggggagggggctctgcttctgcgggaagtgccgctgccacccgggctttgagggctcagcgtgccagtgcgagaggaccactgagggctgcctgaacccgcggcgtgttgagtgtagtggtcgtggccggtgcggctgcaacgtatgcgagtgccattcaggctaccagctgcctctgtgccaggagtgccccggctgcccctcaccctgtggcaagtacatctcctgcgccgagtgcctgaagttcgaaaagggcccctttgggaagaactgcagcgcggcgtgtccgggcctgcagctgtcgaacaaccccgtgaagggcaggacctgcaaggagagggactcagagggctgctgggtggcctacacgctggagcagcaggacgggatggaccgctacctcatctatgtggatgagagccgagagtgtgtggcaggccccaacatcgccgccatcgtcgggggcaccgtggcaggcatcgtgctgatcggcattctcctgctggtcatctggaaggctctgatccacctgagcgacctccgggagtacaggcgctttgagaaggagaagctcaagtcccagtggaacaatgataatccccttttcaagagcgccaccacgacggtcatgaaccccaagtttgctgagagttaggagcacttgg

SEQ ID NO: 363 - DNA, 2291 bp, Homo sapiens
ctcgccctggtggggctgctctccctcgggtgcgtcctctctcaggagtgcacgaagttcaaggtcagcagctgccgggaatgcatcgagtcggggcccggctgcacctggtgccagaagctgaacttcacagggccgggggatcctgactccattcgctgcgacacccggccacagctgctcatgaggggctgtgcggctgacgacatcatggaccccacaagcctcgctgaaacccaggaagaccacaatgggggccagaagcagctgtccccacaaaaagtgacgctttacctgcgaccaggccaggcagcagcgttcaacgtgaccttccggcgggccaagggctaccccatcgacctgtactatctgatggacctctcctactccatgcttgatgacctcaggaatgtcaagaagctaggtggcgacctgctccgggccctcaacgagatcaccgagtccggccgcattggcttcgggtccttcgtggacaagaccgtgctgccgttcgtgaacacgcaccctgataagctgcgaaacccatgccccaacaaggagaaagagtgcccgcccccgtttgccttcaggcacgtgctgaagctgaccaacaactccaaccagtttcagaccgaggtcgggaagcagctgatttccggaaacctggatgcacccgagggtgggctggacgccatgatgcaggtcgccgcctgcccggaggaaatcggctggcgcaacgtcacgcggctgctggtgtttgccactgatgacggcttccatttcgcgggcgacggaaagctgggcgccatcctgacccccaacgacggccgctgtcacctggaggacaacttgtacaagaggagcaacgaattcgactacccatcggtgggccagctggcgcacaagctggctgaaaacaacatccagcccatcttcgcggtgaccagtaggatggtgaagacctacgagaaactcaccgagatcatccccaagtcagccgtgggggagctgtctgaggactccagcaatgtggtccatctcattaagaatgcttacaataaactctcctccagggtcttcctggatcacaacgccctccccgacaccctgaaagtcacctacgactccttctgcagcaatggagtgacgcacaggaaccagcccagaggtgactgtgatggcgtgcagatcaatgtcccgatcaccttccaggtgaaggtcacggccacagagtgcatccaggagcagtcgtttgtcatccgggcgctgggcttcacggacatagtgaccgtgcaggtccttccccagtgtgagtgccggtgccgggaccagagcagagaccgcagcctctgccatggcaagggcttcttggagtgcggcatctgcaggtgtgacactggctacattgggaaaaactgtgagtgccagacacagggccggagcagccaggagctggaaggaagctgccggaaggacaacaactccatcatctgctcagggctgggggactgtgtctgcgggcagtgcctgtgccacaccagcgacgtccccggcaagctgatatacgggcagtactgcgagtgtgacaccatcaactgtgagcgctacaacggccaggtctgcggcggcccggggagggggctctgcttctgcgggaagtgccgctgccacccgggctttgagggctcagcgtgccagtgcgagaggaccactgagggctgcctgaacccgcggcgtgttgagtgtagtggtcgtggccggtgccgctgcaacgtatgcgagtgccattcaggctaccagctgcctctgtgccaggagtgccccggctgcccctcaccctgtggcaagtacatctcctgcgccgagtgcctgaagttcgaaaagggcccctttgggaagaactgcagcgcggcgtgtccgggcctgcagctgtcgaacaaccccgtgaagggcaggacctgcaaggagagggactcagagggctgctgggtggcctacacgctggagcagcaggacgggatggaccgctacctcatctatgtggatgagagccgagagtgtgtggcaggccccaacatcgccgccatcgtcgggggcaccgtggcaggcatcgtgctgatcggcattctcctgctggtcatctggaaggctctgatccacctgagcgacctccgggagtacaggcgctttgagaaggagaagctcaagtcccagtggaacaatgataatccccttttcaagagcgccaccacgacggtcatgaaccccaagtttgctgagagttaggagca

SEQ ID NO: 364 - DNA, 2122 bp, Homo sapiens
tctttctctgtctctctctgtctgtctctctctgtctctgccccatctctgtctgtctctgtctctgcctctctctgtttctctccatctctctgtctctggctctggctctgcccatctctgtctgtctctgcctctctctgtttctccccatctctcttatcgcttgaacaatttatgcagctcctgccctgtgctaggtcctggggactcaaggctgaggagcagcagaagctcccacccctgaggctcacaccctggctccatgctagtccctgtggtcaggctgtctcgagggcaggactgtggccctggcagccctgccatcctcagcacatcctgctgtgctctcctctgtgtcattagctgacactggggacttgcactgagaggagaagtggagacgggtctaaaccgctgggccaggcagggccaggacaacagaaacactcgcccccaagagtaaccgctctctgcccgcagaaactctcctccagggtcttcctggatcacaacgccctccccgacaccctgaaagtcacctacgactccttctgcagcaatggagtgacgcacaggaaccagcccagaggtgactgtgatggcgtgcagatcaatgtcccgatcaccttccaggtgaaggtcacggccacagagtgcatccaggagcagtcgtttgtcatccgggcgctgggcttcacggacatagtgaccgtgcaggttcttccccagtgtgagtgccggtgccgggaccagagcagagaccgcagcctctgccatggcaagggcttcttggagtgcggcatctgcaggtgtgacactggctacattgggaaaaactgtgagtgccagacacagggccggagcagccaggagctggaaggaagctgccggaaggacaacaactccatcatctgctcagggctgggggactgtgtctgcgggcagtgcctgtgccacaccagcgacgtccccggcaagctgatatacgggcagtactgcgagtgtgacaccatcaactgtgagcgctacaacggccaggtctgcggcggcccggggagggggctctgcttctgcgggaagtgccgctgccacccgggctttgagggctcagcgtgccagtgcgagaggaccactgagggctgcctgaacccgcggcgtgttgagtgtagtggtcgtggccggtgccgctgcaacgtatgcgagtgccattcaggctaccagctgcctctgtgccaggagtgccccggctgcccctcaccctgtggcaagtacatctcctgcgccgagtgcctgaagttcgaaaagggcccctttgggaagaactgcagcgcggcttgtccgggcctgcagctgtcgaacaaccccgtgaagggcaggacctgcaaggagagggactcagagggctgctgggtggcctacacgctggagcagcaggacgggatggaccgctacctcatctatgtggatgagagccgagagtgtgtggcaggccccaacatcgccgccatcgtcgggggcaccgtggcaggcatcgtgctgatcggcattctcctgctggtcatctggaaggctctgatccacctgagcgacctccgggagtacaggcgctttgagaaggagaagctcaagtcccagtggaacaatgataatccccttttcaagagcgccaccacgacggtcatgaaccccaagtttgctgagagttaggagcacttggtgaagacaaggccgtcaggacccaccatgtctgccccatcacgcggccgagacatggcttgccacagctcttgaggatgtcaccaattaaccagaaatccagttattttccgccctcaaaatgacagccatggccggccgggtgcttctgggggctcgtcggggggacagctccactctgactggcacagtctttgcatggagacttgaggagggagggcttgaggttggtgaggttaggtgcgtgtttcctgtgcaagtcaggacatcagtctgattaaaggtggtgccaatttatttacatttaaacttgtcagggtataaaatgacatcccattaattatattgttaatcaatcacgtgtatagaaaaaaaataaaacttcaatacaggctgtccatgg

SEQ ID NO: 365 - DNA, 2875 bp, Homo sapiens
atccagggtgaggaaggcagcccacacttttcttggagacacatccccaaagacgtcctcacgtggctccgtttgggcagaaaccatgaattgaacgggaaaagaaatatgtcaagtatcagaaagaagagtggcatgctttgacagcaagtggactccgagtccagggcagagcctcagttagggacatgctgggcctgcgccccccactgctcgccctggtggggctgctctccctcgggtgcgtcctctctcaggagtgcacgaagttcaaggtcagcagctgccgggaatgcatcgagtcggggcccggctgcacctggtgccagaagctgaacttcacagggccgggggatcctgactccattcgctgcgacacccggccacagctgctcatgaggggctgtgcggctgacgacatcatggaccccacaagcctcgctgaaacccaggaagaccacaatgggggccagaagcagctgtccccacaaaaagtgacgctttacctgcgaccaggccaggcagcagcgttcaacgtgaccttccggcgggccaagggctaccccatcgacctgtactatctgatggacctctcctactccatgcttgatgacctcaggaatgtcaagaagctaggtggcgacctgctccgggccctcaacgagatcaccgagtccggccgcattggcttcgggtccttcgtggacaagaccgtgctgccgttcgtgaacacgcaccctgataagctgcgaaacccatgccccaacaaggagaaagagtgccagcccccgtttgccttcaggcacgtgctgaagctgaccaacaactccaaccagtttcagaccgaggtcgggaagcagctgatttccggaaacctggatgcacccgagggtgggctggacgccatgatgcaggtcgccgcctgcccggaggaaatcggctggcgcaacgtcacgcggctgctggtgtttgccactgatgacggcttccatttcgcgggcgacgggaagctgggcgccatcctgacccccaacgacggccgctgtcacctggaggacaacttgtacaagaggagcaacgaattcgactacccatcggtgggccagctggcgcacaagctggctgaaaacaacatccagcccatcttcgcggtgaccagtaggatggtgaagacctacgagaaactcaccgagatcatccccaagtcagccgtgggggagctgtctgaggactccagcaatgtggtccatctcattaagaatgcttacaataaactctcctccagggtattcctggatcacaacgccctccccgacactctgaaagtcacctacgactccttctgcagcaatggagtgacgcacaggaaccagcccagaggtgactgtgatggcgtgcagatcaatgtcccgatcaccttccaggtgaaggtcacggccacagagtgcatccaggagcagtcgtttgtcatccgggcgctgggcttcacggacatagtgaccgtgcaggtccttccccagtgtgagtgccggtgccgggaccagagcagagaccgcagcctctgccatggcaagggcttcttggagtgcggcatctgcaggtgtgacactggctacattgggaaaaactgtgagtgccagacacagggccggagcagccaggagctggaaggaagctgccggaaggacaacaactccatcatctgctcagggctgggggactgtgtctgcgggcagtgcctgtgccacaccagcgacgtcccctgcaagctgatatacgggcagtactgcgagtgtgacaccatcaactgtgagcgctacaacggccaggtctgcggcggcccggggagggggctctgcttctgcgggaagtgccgctgccacccgggctttgagggctcagcgtgccagtgcgagaggaccactgagggctgcctgaacccgcggcgtgttgagtgtagtggtcgtggccggtgccgctgcaacgtatgcgagtgccattcaggctaccagctgcctctgtgccaggagtgccccggctgcccctcaccctgtggcaagtacatctcctgcgccaagtgcctgaagttcgaaaagggcccctttgggaagaactgcagcgcggcgtgtccgggcctgcagctgtcgaacaaccccgtgaagggcaggacctgcaaggagagggactcagagggctgctgggtggcctacacgctggagcagcaggacgggatggaccgctacctcatctatgtggatgagagccgagagtgtgtggcaggccccaacatcgccgccatcgtcgggggcaccgtggcaggcatcgtgctgatcggcattctcctgctggtcatctggaaggctctgatccacctgagcgacctccgggagtacaggcgctttgagaaggagaagctcaagtcccagtggaacaatgataatccccttttcaagagcgccaccacgacggtcatgaaccccaagtttgctgagagttaggagcacttggtgaagacaaggccgtcaggacccaccatgtctgccccatcacgcggccgagacatggcttgccacagctcttgaggatgtcaccaattaaccagaaatccagttattttccgccctcaaaatgacagccatggccggccgggtgcttctgggggctcgtcggggggacagctccactctgactggcacagtctttgcatggagacttgaggagggagggcttgaggttggtgaggttaggtgcgtgtttcctgtgcaagtcaggacatcagtctgattaaaggtggtgccaatttatttacatttaaacttgtcagggtataaaatgacatcccattaattatattgttaatcaatcacgtgtatag

SEQ ID NO: 366 - DNA, 1679 bp, Homo sapiens
gtttgttggctgcggcagcaggtagcaaagtgacgccgagggcctgagtgctccagtagccaccgcatctggagaaccagcggttaccatggaggggatcagtatatacacttcagataactacaccgaggaaatgggctcaggggactatgactccatgaaggaaccctgtttccgtgaagaaaatgctaatttcaataaaatcttcctgcccaccatctactccatcatcttcttaactggcattgtgggcaatggattggtcatcctggtcatgggttaccagaagaaactgagaagcatgacggacaagtacaggctgcacctgtcagtggccgacctcctctttgtcatcacgcttcccttctgggcagttgatgccgtggcaaactggtactttgggaacttcctatgcaaggcagtccatgtcatctacacagtcaacctctacagcagtgtcctcatcctggccttcatcagtctggaccgctacctggccatcgtccacgccaccaacagtcagaggccaaggaagctgttggctgaaaaggtggtctatgttggcgtctggatccctgccctcctgctgactattcccgacttcatctttgccaacgtcagtgaggcagatgacagatatatctgtgaccgcttctaccccaatgacttgtgggtggttgtgttccagtttcagcacatcatggttggccttatcctgcctggtattgtcatcctgtcctgctattgcattatcatctccaagctgtcacactccaagggccaccagaagcgcaaggccctcaagaccacagtcatcctcatcctggctttcttcgcctgttggctgccttactacattgggatcagcatcgactccttcatcctcctggaaatcatcaagcaagggtgtgagtttgagaacactgtgcacaagtggatttccatcaccgaggccctagctttcttccactgttgtctgaaccccatcctctatgctttccttggagccaaatttaaaacctctgcccagcacgcactcacctctgtgagcagagggtccagcctcaagatcctctccaaaggaaagcgaggtggacattcatctgtttccactgagtctgagtcttcaagttttcactccagctaacacagatgtaaaagacttttttttatacgataaataacttttttttaagttacacatttttcagatataaaagactgaccaatattgtacagtttttattgcttgttggatttttgtcttgtgtttctttagtttttgtgaagtttaattgacttatttatataaattttttttgtttcatattgatgtgtgtctaggcaggacctgtggccaagttcttagttgctgtatgtctcgtggtaggactgtagaaaagggaactgaacattccagagcgtgtagtgaatcacgtaaagctagaaatgatccccagctgtttatgcatagataatctctccattcccgtggaacgtttttcctgttcttaagacgtgattttgctgtagaagatggcacttataaccaaagcccaaagtggtatagaaatgctggtttttcagttttcaggagtgggttgatttcagcacctacagtgtacagtcttgtattaagttgttaataaaagtacatgttaaacttacttagtgttatg

SEQ ID NO: 367 - DNA, 1670 bp, Homo sapiens
cggcacgaggcaagtgacgccgagggcctgagtgctccagtagccaccgcatctggagaaccagcggttaccatggaggggatcagtatatacacttcagataactacaccgaggaaatgggctcaggggactatgactccatgaaggaaccctgtttccgtgaagaaaatgctaatttcaataaaatcttcctgcccaccatctactccatcatcttcttaactggcattgtgggcaatggattggtcatcctggtcatgggttaccagaagaaactgagaagcatgacggacaagtacaggctgcacctgtcagtggccgacctcctctttgtcatcacgcttcccttctgggcagttgatgccgtggcaaactggtactttgggaacttcctatgcaaggcagtccatgtcatctacacagtcaacctctacagcagtgtcctcatcctggccttcatcagtctggaccgctacctggccatcgtccacgccaccaacagtcagaggccaaggaagctgttggctgaaaaggtggtctatgttggcgtctggatccctgccctcctgctgactattcccgacttcatctttgccaacgtcagtgaggcagatgacagatatatctgtgaccgcttctaccccaatgacttgtgggtggttgtgttccagtttcagcacatcatggttggccttatcctgcctggtattgtcatcctgtcctgctattgcattatcatctccaagctgtcacactccaagggccaccagaagcgcaaggccctcaagaccacagtcatcctcatcctggctttcttcgcctgttggctgccttactacattgggatcagcatcgactccttcatcctcctggaaatcatcaagcaagggtgtgagtttgagaacactgtgcacaagtggatttccatcaccgaggccctagctttcttccactgttgtctgaaccccatcctctatgctttccttggagccaaatttaaaacctctgcccagcacgcactcacctctgtgagcagagggtccagcctcaagatcctctccaaaggaaagcgaggtggacattcatctgtttccactgagtctgagtcttcaagttttcactccagctaacacagatgtaagagacttttttttatacgataaataacttttttttaagttacacatttttcagatataaaagactgaccaatattgtacagtttttattgcttgttggatttttgctcttgtgtttctttagtttttcgtgaaggtttaattgacttatttatataaattttttttgtttcatattgatgtgtgtctaggcaggacctgtggccaagttcttagttgctgtatgtctcgtggtaggactgtagaaaagggaactgaacattccagagcgtgtagtgaatcacgtaaagctagaaatgatccccagctgtttatgcatagataatctctccattcccgtggaacgtttttcctgttcttaagacgtgattttgctgtagaagatggcacttataaccaaagcccaaagtggtatagaaatgctggtttttcagttttcaggagtgggttgatttcagcacctacagtgtacagtcttgtattaagttgttaataaaagtacatgttaaacttaaaaaaaaaaaaaaaaa

SEQ ID NO: 368 - DNA, 1950 bp, Homo sapiens
ggaattcggcacgaggagagagagaactagtctcgcgtttttttttcttccctctagtgggcggggcagaggagttagccaagatgtgactttgaaaccctcagcgtctcagtgcccttttgttctaaacaaagaattttgtaattggttctaccaaagaaggatataatgaagtcactatgggaaaagatggggaggagagttgtaggattctacattaattctcttgtgcccttagcccactacttcagaatttcctgaagaaagcaagcctgaattggttttttaaattgctttaaaaattttttttaactgggttaatgcttgctgaattggaagtgaatgtccattcctttgcctcttttgcagatatacacttcagataactacaccgaggaaatgggctcaggggactatgactccatgaaggaaccctgtttccgtgaagaaaatgctaatttcaataaaatcttcctgcccaccatctactccatcatcttcttaactggcattgtgggcaatggattggtcatcctggtcatgggttaccagaagaaactgagaagcatgacggacaagtacaggctgcacctgtcagtggccgacctcctctttgtcatcacgcttcccttctgggcagttgatgccgtggcaaactggtactttgggaacttcctatgcaaggcagtccatgtcatctacacagtcaacctctacagcagtgtcctcatcctggccttcatcagtctggaccgctacctggccatcgtccacgccaccaacagtcagaggccaaggaagctgttggctgaaaaggtggtctatgttggcgtctggatccctgccctcctgctgactattcccgacttcatctttgccaacgtcagtgaggcagatgacagatatatctgtgaccgcttctaccccaatgacttgtgggtggttgtgttccagtttcagcacatcatggttggccttatcctgcctggtattgtcatcctgtcctgctattgcattatcatctccaagctgtcacactccaagggccaccagaagcgcaaggccctcaagaccacagtcatcctcatcctggctttcttcgcctgttggctgccttactacattgggatcagcatcgactccttcatcctcctggaaatcatcaagcaagggtgtgagtttgagaacactgtgcacaagtggatttccatcaccgaggccctagctttcttccactgttgtctgaaccccatcctctatgctttccttggagccaaatttaaaacctctgcccagcacgcactcacctctgtgagcagagggtccagcctcaagatcctctccaaaggaaagcgaggtggacattcatctgtttccactgagtctgagtcttcaagttttcactccagctaacacagatgtaaaagacttttttttatacgataaataacttttttttaagttacacatttttcagatataaaagactgaccaatattgtacagtttttattgcttgttggatttttgtcttgtgtttctttagtttttgtgaagtttaattgacttatttatataaattttttttgtttcatattgatgtgtgtctaggcaggacctgtggccaagttcttagttgctgtatgtctcgtggtaggactgtagaaaagggaactgaacattccagagcgtgtagtgaatcacgtaaagctagaaatgatccccagctgtttatgcatagataatctctccattcccgtggaacgtttttcctgttcttaagacgtgattttgctgtagaagatggcacttataaccaaagcccaaagtggtatagaaatgctggtttttcagttttcaggagtgggttgatttcagcacctacagtgtacagtcttgtattaagttgttaataaaagtacatgttaaacttaaaaaaaaaaaaaaaaaa

SEQ ID NO: 369 - DNA, 1664 bp, Homo sapiens
cggcagcaggtagcaaagtgacgccgagggcctgagtgctccagtagccaccgcatctggagaaccagcggttaccatggaggggatcagtatatacacttcagataactacaccgaggaaatgggctcaggggactatgactccatgaaggaaccctgtttccgtgaagaaaatgctaatttcaataaaatcttcctgcccaccatctactccatcatcttcttaactggcattgtgggcaatggattggtcatcctggtcatgggttaccagaagaaactgagaagcatgacggacaagtacaggctgcacctgtcagtggccgacctcctctttgtcatcacgcttcccttctgggcagttgatgccgtggcaaactggtactttgggaacttcctatgcaaggcagtccatgtcatctacacagtcaacctctacagcagtgtcctcatcctggccttcatcagtctggaccgctacctggccatcgtccacgccaccaacagtcagaggccaaggaagctgttggctgaaaaggtggtctatgttggcgtctggatccctgccctcctgctgactattcccgacttcatctttgccaacgtcagtgaggcagatgacagatatatctgtgaccgcttctaccccaatgacttgtgggtggttgtgttccagtttcagcacatcatggttggccttatcctgcctggtattgtcatcctgtcctgctattgcattatcatctccaagctgtcacactccaagggccaccagaagcgcaaggccctcaagaccacagtcatcctcatcctggctttcttcgcctgttggctgccttactacattgggatcagcatcgactccttcatcctcctggaaatcatcaagcaagggtgtgagtttgagaacactgtgcacaagtggatttccatcaccgaggccctagctttcttccactgttgtctgaaccccatcctctatgctttccttggagccaaatttaaaacctctgcccagcacgcactcacctctgtgagcagagggtccagcctcaagatcctctccaaaggaaagcgaggtggacattcatctgtttccactgagtctgagtcttcaagttttcactccagctaacacagatgtaaaagacttttttttatacgataaataacttttttttaagttacacatttttcagatataaaagactgaccaatattgtacagtttttattgcttgttggatttttgtcttgtgtttctttagtttttgtgaagtttaattgacttatttatataaattttttttgtttcatattgatgtgtgtctaggcaggacctgtggccaagttcttagttgctgtatgtctcgtggtaggactgtagaaaagggaactgaacattccagagcgtgtagttaatcacgtaaagctagaaatgatccccagctgtttatgcatagataatctctccattcccgtggaacgtttttcctgttcttaagacgtgattttgctgtagaagatggcacttataaccaaagcccaaagtggtatagaaatgctggtttttcagttttcaggagtgggttgatttcagcacctacagtgtacagtcttgtattaagttgttaataaaagtacatgttaaacttaaaaaaaaaa

SEQ ID NO: 370 - DNA, 1225 bp, Homo sapiens
cgcatctggagaaccagcggttaccatggaggggatcagtatatacacttcagataactacaccgaggaaatgggctcaggggactatgactccatgaaggaaccctgtttccgtgaagaaaatgctaatttcaataaaatcttcctgcccaccatctactccatcatcttcttaactggcattgtgggcaatggattggtcatcctggtcatgggttaccagaagaaactgagaagcatgacggacaagtacaggctgcacctgtcagtggccgacctcctctttgtcatcacgcttcccttctgggcagttgatgccgtggcaaactggtactttgggaacttcctatgcaaggcagtccatgtcatctacacagtcaacctctacagcagtgtcctcatcctggccttcatcagtctggaccgctacctggccatcgtccacgccaccaacagtcagaggccaaggaagctgttggctgaaaaggtggtctatgttggcgtctggatccctgccctcctgctgactattcccgacttcatctttgccaacgtcagtgaggcagatgacagatatatctgtgaccgcttctaccccaatgacttgtgggtggttgtgttccagtttcagcacatcatggttggccttatcctgcctggtattgtcatcctgtcctgctattgcattatcatctccaagctgtcacactccaagggccaccagaagcgcaaggccctcaagaccacagtcatcctcatcctggctttcttcgcctgttggctgccttactacattgggatcagcatcgactccttcatcctcctggaaatcatcaagcaagggtgtgagtttgagaacactgtgcacaagtggatttccatcaccgaggccctagctttcttccactgttgtctgaaccccatcctctatgctttccttggagccaaatttaaaacctctgcccagcacgcactcacctctgtgagcagagggtccagcctcaagatcctctccaaaggaaagcgaggtggacattcatctgtttccactgagtctgagtcttcaagttttcactccagctaacacagatgtaaaagactttttttttatacgataaataacttttttttaagttacacatttttcagatataaaagactgaccaatattgtacagtttttattgcttgttggatttttgtcttgtgtttctttagtttttgtg

SEQ ID NO: 371 - DNA, 1102 bp, Homo sapiens
gcgtcgacgtcttgccaccgcatctggagaaccagcggttaccatggaggggatcagtatatacacttcagataactacaccgaggaaatgggctcaggggactatgactccatgaaggaaccctgtttccgtgaagaaaatgctaatttcaataaaatcttcctgcccaccatctactccatcatcttcttaactggcattgtgggcaatggattggtcatcctggtcatgggttaccagaagaaactgagaagcatgacggacaagtacaggctgcacctgtcagtggccgacctcctctttgtcatcacgcttcccttctgggcagttgatgccgtggcaaactggtactttgggaacttcctatgcaaggcagtccatgtcatctacacagtcaacctctacagcagtgtcctcatcctggccttcatcagtctggaccgctacctggccattgtccacgccaccaacagtcagaggccaaggaagctgttggctgaaaaggtggtctatgttggcgtctggatccctgccctcctgctgactattcccgacttcatctttgccaacgtcagtgaggcagatgacagatatatctgtgaccgcttctaccccaatgacttgtgggtggttgtgttccagtttcagcacatcatggttggccttatcctgcctggtattgtcatcctgtcctgctattgcattatcatctccaagctgtcacactccaagggccaccagaagcgcaaggccctcaagaccacaatcatccccatcctggctttcttcgcctgttggctgccttactacattgggatcagcatcgactccttcatcctcctggaaatcatcaagcaagggtgtgagtttgagaacactgtgcacaagtggatttccatcaccgaggccctagctttcttccactgttgtctgaaccccatcctctatgctttccttggagccaaatttaaaacctctgcccagcacgcactcacctctgtgagcagagggtccagcctcaagatcctctccaaaggaaagcgaggtggacattcatctgtttccactgagtctgagtcttcaagttttcactccagctaa

SEQ ID NO: 372 - DNA, 1637 bp, Homo sapiens
ggcacgagcggcacagggtagcaaagtgacgccgagggcctgagtgctccagtagccaccgcatctggagaaccagcggttaccatggaggggatcagtatatacacttcagataactacaccgaggaaatgggctcaggggactatgactccatgaaggaaccctgtttccgtgaagaaaatgctaatttcaataaaatcttcctgcccaccatctactccatcatcttcttaactggcattgtgggcaatggattggtcatcctggtcatgggttaccagaagaaactgagaagcatgacggacaagtacaggctgcacctgtcagtggccgacctcctctttgtcatcacgcttcccttctgggcagttgatgccgtggcaaactggtactttgggaacttcctatgcaaggcagtccatgtcatctacacagtcaacctctacagcagtgtcctcatcctggccttcatcagtctggaccgctacctggccatcgtccacgccaccaacagtcagaggccaaggaagctgttggctgaaaaggtggtctatgttggcgtctggatccctgccctcctgctgactattcccgacttcatctttgccaacgtcagtgaggcagatgacagatatatctgtgaccgcttctaccccaatgacttgtgggtggttgtgttccagtttcagcacatcatggttggccttatcctgcctggtattgtcatcctgtcctgctattgcattatcatctccaagctgtcacactccaagggccaccagaagcgcaaggccctcaagaccacagtcatcctcatcctggctttcttcgcctgttggctgccttactacattgggatcagcatcgactccttcatcctcctggaaatcatcaagcaagggtgtgagtttgagaacactgtgcacaagtggatttccatcaccgaggccctagctttcttccactgttgtctgaaccccatcctctatgctttccttggagccaaatttaaaacctctgcccagcacgcactcacctctgtgagcagagggtccagcctcaagatcctctccaaaggaaagcgaggtggacattcatctgtttccactgagtctgagtcttcaagttttcactccagctaacacagatgtaaaagacttttttttatacgataaataacttttttttaagttacacatttttcagatataaaagactgaccaatattgtacagtttttattgcttgttggatttttgtcttgtgtttctttagtttttgtgaagtttaattgacttgatttatataaattttttttgtttcatattgacgtgtgtctaggcaggacctgtggccaagttcttgatgcggatgctctgtggtaggactgtagaaagggaactgaacattccagagctgtagtgaatcacgtaaagctagaaatgatccccagctgtttatgcatagataatctctccattcccgtggaacgtttttcctgttcttaagacgtgattttgctgtagaagatggcacttataaccaaagcccaaagtggtatagaaatgctggtttttcagttttcaggagtgggttgatttcagcacctacagtgtacagtcttgtattaagttgtt

SEQ ID NO: 373 - DNA, 1699 bp, Homo sapiens
cccacgcgtccgcggacgcgtgggcggacgcgtggggccgagggcctgagtgctccagtagccaccgcatctggagaaccagcggttaccatggaggggatcagtatatacacttcagataactacaccgaggaaatgggctcaggggactatgactccatgaaggaaccctgtttccgtgaagaaaatgctaatttcaataaaatcttcctgcccaccatctactccatcatcttcttaactggcattgtgggcaatggattggtcatcctggtcatgggttaccagaagaaactgagaagcatgacggacaagtacaggctgcacctgtcagtggccgacctcctctttgtcatcacgcttcccttctgggcagttgatgccgtggcaaactggtactttgggaacttcctatgcaaggcagtccatgtcatctacacagtcaacctctacagcagtgtcctcatcctggccttcatcagtctggaccgctacctggccatcgtccacgccaccaacagtcagaggccaaggaagctgttggctgaaaaggtggtctatgttggcgtctggatccctgccctcctgctgactattcccgacttcatctttgccaacgtcagtgaggcagatgacagatatatctgtgaccgcttctaccccaatgacttgtgggtggttgtgttccagtttcagcacatcatggttggccttatcctgcctggtattgtcatcctgtcctgctattgcattatcatctccaagctgtcacactccaagggccaccagaagcgcaaggccctcaagaccacagtcatcctcatcctggctttcttcgcctgttggctgccttactacattgggatcagcatcgactccttcatcctcctggaaatcatcaagcaagggtgtgagtttgagaacactgtgcacaagtggatttccatcaccgaggccctagctttcttccactgttgtctgaaccccatcctctatgctttccttggagccaaatttaaaacctctgcccagcacgcactcacctctgtgagcagagggtccagcctcaagatcctctccaaaggaaagcgaggtggacattcatctgtttccactgagtctgagtcttcaagttttcactccagctaacacagatgtaaaagacttttttttatacgataaataacttttttttaagttacacatttttcagatataaaagactgaccaatattgtacagtttttattgcttgttggatttttgtcttgtgtttctttagtttttgtgaagtttaattgacttatttatataaattttttttgtttcatattgatgtgtgtctaggcaggacctgtggccaagttcttagttgctgtatgtctcgtggtaggactgtagaaaagggaactgaacattccagagcgtgtagtgaatcacgtaaagctagaaatgatccccagctgtttatgcatagataatctctccattcccgtggaacgtttttcctgttcttaagacgtgattttgctgtagaagatggcacttataaccaaagcccaaagtggtatagaaatgctggtttttcagttttcaggagtgggttgatttcagcacctacagtgtacagtcttgtattaagttgttaataaaagtacatgttaaacttaaaaaaaaaaaaaaaaaaaaaaaaaaaaaaa

SEQ ID NO: 374 - DNA, 1645 bp, Homo sapiens
gtagcaaagtgacgccgagggcctgagtgctccagtagccaccgcatctggagaaccagcggttaccatggaggggatcagtatatacacttcagataactacaccgaggaaatgggctcaggggactatgactccatgaaggaaccctgtttccgtgaagaaaatgctaatttcaataaaatcttcctgcccaccatctactccatcatcttcttaactggcattgtgggcaatggattggtcatcctggtcatgggttaccagaagaaactgagaagcatgacggacaagtacaggctgcacctgtcagtggccgacctcctctttgtcatcacgcttcccttctgggcagttgatgccgtggcaaactggtactttgggaacttcctatgcaaggcagtccatgtcatctacacagtcaacctctacagcagtgtcctcatcctggccttcatcagtctggaccgctacctggccatcgtccacgccaccaacagtcagaggccaaggaagctgttggctgaaaaggtggtctatgttggcgtctggatccctgccctcctgctgactattcccgacttcatctttgccaacgtcagtgaggcagatgacagatatatctgtgaccgcttctaccccaatgacttgtgggtggttgtgttccagtttcagcacatcatggttggccttatcctgcctggtattgtcatcctgtcctgctattgcattatcatctccaagctgtcacactccaagggccaccagaagcgcaaggccctcaagaccacagtcatcctcatcctggctttcttcgcctgttggctgccttactacattgggatcagcatcgactccttcatcctcctggaaatcatcaagcaagggtgtgagtttgagaacactgtgcacaagtggatttccatcaccgaggccctagctttcttccactgttgtctgaaccccatcctctatgctttccttggagccaaatttaaaacctctgcccagcacgcactcacctctgtgagcagagggtccagcctcaagatcctctccaaaggaaagcgaggtggacattcatctgtttccactgagtctgagtcttcaagttttcactccagctaacacagatgtaaaagacttttttttatacgataaataacttttttttaagttacacatttttcagatataaaagactgaccaatattgtacagtttttattgcttgttggatttttgtcttgtgtttctttagtttttgtgaagtttaattgacttatttatataaattttttttgtttcatattgatgtgtgtctaggcaggacctgtggccaagttcttagttgctgtatgtctcgtggtaggactgtagaaaagggaactgaacattccagagcgtgtagtgaatcacgtaaagctagaaatgatccccagctgtttatgcatagataatctctccattcccgtggaacgtttttcctgttcttaagacgtgattttgctgtagaagatggcacttataaccaaagcccaaagtggtatagaaatgctggtttttcagttttcaggagtgggttgatttcagcacctacagtgtacagtcttgtattaagttgttaataaaagtacatgttaaactt

SEQ ID NO: 375 - DNA, 1059 bp, Homo sapiens
atggaggggatcagtatatacacttcagataactacaccgaggaaatgggctcaggggactatgactccatgaaggaaccctgtttccgtgaagaaaatgctaatttcaataaaatcttcctgcccaccatctactccatcatcttcttaactggcattgtgggcaatggattggtcatcctggtcatgggttaccagaagaaactgagaagcatgacggacaagtacaggctgcacctgtcagtggccgacctcctctttgtcatcacgcttcccttctgggcagttgatgccgtggcaaactggtactttgggaacttcctatgcaaggcagtccatgtcatctacacagtcaacctctacagcagtgtcctcatcctggccttcatcagtctggaccgctacctggccatcgtccacgccaccaacagtcagaggccaaggaagctgttggctgaaaaggtggtctatgttggcgtctggatccctgccctcctgctgactattcccgacttcatctttgccaacgtcagtgaggcagatgacagatatatctgtgaccgcttctaccccaatgacttgtgggtggttgtgttccagtttcagcacatcatggttggccttatcctgcctggtattgtcatcctgtcctgctattgcattatcatctccaagctgtcacactccaagggccaccagaagcgcaaggccctcaagaccacagtcatcctcatcctggctttcttcgcctgttggctgccttactacattgggatcagcatcgactccttcatcctcctggaaatcatcaagcaagggtgtgagtttgagaacactgtgcacaagtggatttccatcaccgaggccctagctttcttccactgttgtctgaaccccatcctctatgctttccttggagccaaatttaaaacctctgcccagcacgcactcacctctgtgagcagagggtccagcctcaagatcctctccaaaggaaagcgaggtggacattcatctgtttccactgagtctgagtcttcaagttttcactccagctaa

SEQ ID NO: 376 - DNA, 1504 bp, Homo sapiens
cctaagatgagctttccatgtaaatttgtagccagcttccttctgattttcaatgtttcttccaaaggtgcagtctccaaagagattacgaatgccttggaaacctggggtgccttgggtcaggacatcaacttggacattcctagttttcaaatgagtgatgatattgacgatataaaatgggaaaaaacttcagacaagaaaaagattgcacaattcagaaaagagaaagagactttcaaggaaaaagatacatataagctatttaaaaatggaactctgaaaattaagcatctgaagaccgatgatcaggatatctacaaggtatcaatatatgatacaaaaggaaaaaatgtgttggaaaaaatatttgatttgaagattcaagagagggtctcaaaaccaaagatctcctggacttgtatcaacacaaccctgacctgtgaggtaatgaatggaactgaccccgaattaaacctgtatcaagatgggaaacatctaaaactttctcagagggtcatcacacacaagtggaccaccagcctgagtgcaaaattcaagtgcacagcagggaacaaagtcagcaaggaatccagtgtcgagcctgtcagctgtccagagaaaggtctggacatctatctcatcattggcatatgtggaggaggcagcctcttgatggtctttgtggcactgctcgttttctatatcaccaaaaggaaaaaacagaggagtcggagaaatgatgaggagctggagacaagagcccacagagtagctactgaagaaaggggccggaagccccaacaaattccagcttcaacccctcagaatccagcaacttcccaacatcctcctccaccacctggtcatcgttcccaggcacctagtcatcgtcccccgcctcctggacaccgtgttcagcaccagcctcagaagaggcctcctgctccgtcgggcacacaagttcaccagcagaaaggcccgcccctccccagacctcgagttcagccaaaacctccccatggggcagcagaaaactcattgtccccttcctctaattaaaaaagatagaaactgtctttttcaataaaaagcactgtggatttctgccctcctgatgtgcatatccgtacttccatgaggtgttttctgtgtgcagaacattgtcacctcctgaggctgtgggccacagccacctctgcatcttcgaactcagccatgtggtcaacatctggagtttttggtctcctcagagagctccatcacaccagtaaggagaagcaatataagtgtgattgcaagaatggtagaggaccgagcacagaaatcttagagatttcttgtcccctctcaggtcatgtgtagatgcgataaatcaagtgattggtgtgcctgggtctcactacaagcagcctatctgcttaagagactctggagtttcttatgtgccctggtggacacttgcccaccatcctgtgagtaaaagtgaaataaaagctttgac

SEQ ID NO: 377 - DNA, 1504 bp, Homo sapiens; identical to SEQ ID NO: 376

SEQ ID NO: 378 - DNA, 1522 bp, Homo sapiens
aaaagaggaaaccaacccctaagatgagctttccatgtaaatttgtagccagcttccttctgattttcaatgtttcttccaaaggtgcagtctccaaagagattacgaatgccttggaaacctggggtgccttgggtcaggacatcaacttggacattcctagttttcaaatgagtgatgatattgacgatataaaatgggaaaaaacttcagacaagaaaaagattgcacaattcagaaaagagaaagagactttcaaggaaaaagatacatataagctatttaaaaatggaactctgaaaattaagcatctgaagaccgatgatcaggatatctataaggtatcaatatatgatacaaaaggaaaaaatgtgttggaaaaaatatttgatttgaagattcaagagagggtctcaaaaccaaagatctcctggacttgtatcaacacaaccctgacctgtgaggtaatgaatggaactgaccccgaattaaacctgtatcaagatgggaaacatctaaaactttctcagagggtcatcacacacaagtggaccaccagcctgagtgcaaaattcaagtgcacagcagggaacaaagtcagcaaggaatccagtgtcgagcctgtcagctgtccagagaaaggtctggacatctatctcatcattggcatatgtggaggaggcagcctcttgatggtctttgtggcactgctcgttttctatatcaccaaaaggaaaaaacagaggagtcggagaaatgatgaggagctggagacaagagcccacagagtagctactgaagaaaggggccggaagccccaccaaattccagcttcaacccctcagaatccagcaacttcccaacatcctcctccaccacctggtcatcgttcccaggcacctagtcatcgtcccccgcctcctggacaccgtgttcagcaccagcctcagaagaggcctcctgctccgtcgggcacacaagttcaccagcagaaaggcccgcccctccccagacctcgagttcagccaaaacctcccatggggcagcagaaaactcattgtccccttcctctaattaaaaaagatagaaactgtctttttcaataaaaagcactgtggatttctgccctcctgatgtgcatatccgtacttccatgaggtgttttctgtgtgcagaacattgtcacctcctgaggctgtgggccacagccacctctgcatcttcgaactcagccatgtggtcaacatctggagtttttggtctcctcagagagctccatcacaccagtaaggagaagcaatataagtgtgattgcaagaagtgtagaggaccgagccagaaatcttagagatttcttgtcccctctcaggtcatgtgtagatgcgataaatcaagtgattggtgtgcctgggtctcactacaagcagcctatctgcttaagagactctggagtttcttatgtgccctggtggacacttgcccaccatcctgtgagtaaaagtgaaataaaagctttgactag

SEQ ID NO: 379 - DNA, 1579 bp, Homo sapiens
accaacccctaagatgagctttccatgtaaatttgtagccagcttccttctgattttcaatgtttcttccaaaggtgcagtctccaaagagattacgaatgccttggaaacctggggtgccttgggtcaggacatcaacttggacattcctagttttcaaatgagtgatgatattgacgatataaaatgggaaaaaacttcagacaagaaaaagattgcacaattcagaaaagagaaagagactttcaaggaaaaagatacatataagctatttaaaaatggaactctgaaaattaagcatctgaagaccgatgatcaggatatctacaaggtatcaatatatgatacaaaaggaaaaaatgtgttggaaaaaatatttgatttgaagattcaagagagggtctcaaaaccaaagatctcctggacttgtatcaacacaaccctgacctgtgaggtaatgaatggaactgaccccgaattaaacctgtatcaagatgggaaacatctaaaactttctcagagggtcatcacacacaagtggaccaccagcctgagtgcaaaattcaagtgcacagcagggaacaaagtcagcaaggaatccagtgtcgagcctgtcagctgtccagagaaaggtctggacatctatctcatcattggcatatgtggaggaggcagcctcttgatggtctttgtggcactgctcgttttctatatcaccaaaaggaaaaaacagaggagtcggagaaatgatgaggagctggagacaagagcccacagagtagctactgaagaaaggggccggaagccccaacaaattccagcttcaacccctcagaatccagcaacttcccaacatcctcctccaccacctggtcatcgttcccaggcacctagtcatcgtcccccgcctcctggacaccgtgttcagcaccagcctcagaagaggcctcctgctccgtcgggcacacaagttcaccagcagaaaggcccgcccctccccagacctcgagttcagccaaaacctccccatggggcagcagaaaactcattgtccccttcctctaattaaaaaagatagaaactgtctttttcaataaaaagcactgtggatttctgccctcctgatgtgcatatccgtacttccatgaggtgttttctgtgtgcagaacattgtcacctcctgaggctgtgggccacagccacctctgcatcttcgaactcagccatgtggtcaacatctggagtttttggtctcctcagagagctccatcacaccagtaaggagaagcaatataagtgtgattgcaagaatggtagaggaccgagcacagaaatcttagagatttcttgtcccctctcaggtcatgtgtagatgcgataaatcaagtgattggtgtgcctgggtctcactacaagcagcctatctgcttaagagactctggagtttcttatgtgccctggtggacacttgcccaccatcctgtgagtaaaagtgaaataaaagctttgactagaaaaaaaaaaaaaaaaaaaaaaaaaaaaaaaaaaaaaaaaaaaaaaaaaaaaaaaaaaaaaaaaa

SEQ ID NO: 380 - DNA, 1510 bp, Homo sapiens
acccctaagatgagctttccatgtaaatttgtagccagcttccttctgattttcaatgtttcttccaaaggtgcagtctccaaagagattacgaatgccttggaaacctggggtgccttgggtcaggacatcaacttggacattcctagttttcaaatgagtgatgatattgacgatataaaatgggaaaaaacttcagacaagaaaaagattgcacaattcagaaaagagaaagagactttcaaggaaaaagatacatataagctatttaaaaatggaactctgaaaattaagcatctgaagaccgatgatcaggatatctacaaggtatcaatatatgatacaaaaggaaaaaatgtgttggaaaaaatatttgatttgaagattcaagagagggtctcaaaaccaaagatctcctggacttgtatcaacacaaccctgacctgtgaggtaatgaatggaactgaccccgaattaaacctgtatcaagatgggaaacatctaaaactttctcagagggtcatcacacacaagtggaccaccagcctgagtgcaaaattcaagtgcacagcagggaacaaagtcagcaaggaatccagtgtcgagcctgtcagctgtccagagaaaggtctggacatctatctcatcattggcatatgtggaggaggcagcctcttgatggtctttgtggcactgctcgttttctatatcaccaaaaggaaaaaacagaggagtcggagaaatgatgaggagctggagacaagagcccacagagtagctactgaagaaaggggccggaagccccaccaaattccagcttcaacccctcagaatccagcaacttcccaacatcctcctccaccacctggtcatcgttcccaggcacctagtcatcgtcccccgcctcctggacaccgtgttcagcaccagcctcagaagaggcctcctgctccgtcgggcacacaagttcaccagcagaaaggcccgcccctccccagacctcgagttcagccaaaacctccccatggggcagcagaaaactcattgtccccttcctctaattaaaaaagatagaaactgtatttttcaataaaaagcactgtggatttctgccctcctgatgtgcatatccgtacttccatgaggtgttttctgtgtgcagaacattgtcacctcctgaggctgtgggccacagccacctctgcatcttcgaactcagccatgtggtcaacatctggagtttttggtctcctcagagagctccatcacaccagtaaggagaagcaatataagtgtgattgcaagaatggtagaggaccgagcacagaaatcttagagatttcctgtcccctctcaggtcatgtgtagatgcgataaatcaagtgattggtgtgcctgggtctcactacaagcagcctatctgcttaagagactctggagtttcttatgtgccctggtggacacttgcccaccatcctgtgagtaaaagtgaaataaaagctttgactag

SEQ ID NO: 381 - DNA, 817 bp, Homo sapiens
gaaggaggcccagacagtgagggcaggagggagagaagagacgcagaaggagagcgagcgagagagaaagggttctggattggaggggagagcaagggagggaggaaggcggtgagagaggcgggggcctcgggagggtgaaaggagggaggagaagggcggggcacggaggcccgagcgagggacaagactccgactccagctctgacttttttcgcggctctcggcttccactgcagccatgtcactcctcttgctggtggtctcagcccttcacatcctcattcttatactgcttttcgtggccactttggacaagtcctggtggactctccctgggaaagagtccctgaatctctggtacgactgcacgtggaacaacgacaccaaaacatgggcctgcagtaatgtcagcgagaatggctggctgaaggcggtgcaggtcctcatggtgctctccctcattctctgctgtctctccttcatcctgttcatgttccagctctacaccatgcgacgaggaggtctcttctatgccaccggcctctgccagctttgcaccagcgtggcggtgtttactggcgccttgatctatgccattcacgccgaggagatcctggagaagcacccgcgagggggcagcttcggatactgcttcgccctggcctgggtggccttccccctcgccctggtcagcggcatcatctacatccacctacggaagcgggagtgagcgccccgcctcgctcggctgcccccgccccttcccggcccccctcgccgcgcgtcctccaaaaaaataaaactttaacggcgg

SEQ ID NO: 382 - DNA, 600 bp, Homo sapiens
ccgactccagctctgacttttttcgcggctctcggcttccactgcagccatgtcactcctcttgctggtggtctcagcccttcacatcctcattcttatactgcttttcgtggccactttggacaagtcctggtggactctccctgggaaagagtccctgaatctctggtacgactgcacgtggaacaacgacaccaaaacatgggcctgcagtaatgtcagcgagaatggctggctgaaggcggtgcaggtcctcatggtgctctccctcattctctgctgtctctccttcatcctgttcatgttccagctctacaccatgcgacgaggaggtctcttctatgccaccggcctctgccagctttgcaccagcgtggcggtgtttactggcgccttgatctatgccattcacgccgaggagatcctggagaagcacccgcgagggggcagcttcggatactgcttcgccctggcctgggtggccttccccctcgccctggtcagcggcatcatctacatccacctacggaagcgggagtgagcgccgcgcctcgctcggctgcccccgccccttccgggcccccctgccgcgcgtcctcc

SEQ ID NO: 383 - DNA, 665 bp, Homo sapiens
agggacaagactccgactccagctctgacttttttcgcggctctcggcttccactgcagccatgtcactcctcttgctggtggtctcagcccttcacatcctcattcttatactgcttttcgtggccactttggacaagtcctggtggactctccctgggaaagagtccctgaatctctggtacgactgcacgtggaacaacgacaccaaaacatgggcctgcagtaatgtcagcgagaatggctggctgaaggcggtgcaggtcctcatggtgctctccctcattctctgctgtctctccttcatcctgttcatgttccagctctacaccatgcgacgaggaggtctcttctatgccaccggcctctgccagctttgcaccagcgtggcggtgtttactggcgccttgatctatgccatccacgccgaggagatcctggagaagcacccgcgagggggcagcttcggatactgcttcgccctggcctgggtggccttccccctcgccctggtcagcggcatcatctacatccacctacggaagcgggagtgagcgccccgcctcgctcggctgcccccgccccttcccggcccccctcgccgcgcgtcctccaaaaaataaaaccttaaccgcggaaaaaaaaaaaaaaaaaaaaaaaaaaaaa

SEQ ID NO: 384 - DNA, 500 bp, Homo sapiens
gccatgtcactcctcttgctggtggtctcagcccttcacatcctcattcttatactgcttttcgtggccactttggacaagtcctggtggactctccctgggaaagagtccctgaatctctggtacgactgcacgtggaacaacgacaccaaaacatgggcctgcagtaatgtcagcgagaatggctggctgaaggcggtgcaggtcctcatggtgctctccctcattctctgctgtctctccttcatcctgttcatgttccagctctacaccatgcgacgaggaggtctcttctatgcccaccggctctgccagctttgcaccagcgtggcggtgtttactggcgccttgatctatgccattcacgccgaggagatcctggagaagcacccgcgagggggcagcttcggatactgcttcgccctggcctgggtggccttccccctcgccctggtcagcggcatcatctacatccacctacggaagcgggagtgagcgcc

SEQ ID NO: 385 - DNA, 817 bp, Homo sapiens; identical to SEQ ID NO: 381
